United States Patent Application Publication US 2009/0005268 A1 - sequence listing, part 3

SEQ ID NO: 2785 - DNA, 4090 bp, Artificial Sequence
  chemically treated genomic DNA (Homo sapiens)
ttaaatttttgaggtattaggttttagatttggtttgagggtgattttgtaagtgtttgtgtttggttgttgtaggttggttggtgggatttggggttagggtgtgtggggggaggggtgtaggttgtttttgtaggtgtgggaaagtagtgtattttgattgtatgtattgttatgtgggtgtatttggttttattttttgttagagggggtatttaagtttgttttggggtaggaaatttggtgtgtgtgggtgtgggggagaggaagaaagttttttttttttgttttttttttgtaaaataaagttttagaagaaaataaaatagaaatggggagttaaagggattagttttaatagagtttagtaaagtagtgaaattagtttgtgggggtggagggtaggtttggtttttggggttgaagaggtgtgggttaggttagaggtggggttggggtgaagttttaaatttaggtttgtgttttggttttatttgtggagggggtgtgagagaaaggttgagagggtgtagggttgaatttgggggtttttttttattttttttatttttagaatttttttgagttgtggggggtgtttgattttttatttttttgttgtgttgtagtttgtgtttttttttgttttttatttgggtttgggtttgggtttgggttttggttttagtgggagtggttgttgtgtgaggtgtgttgggtttttttgggttttgttgggtgtataatttgtgtttgttgtagttgtgtgtttttttttttattgtgtgttttttttgggtttttgttttttgtagggtgtttgtggtgtgggggaaggggtgtgggtgttttttttgtgttgttgggttttgttgtttgtttttgtgttgtgtggtttttttttgttgttggtttgtgttgttttggtttgggaataaagttggtggtgtgtgttgtagttttgggtggtttgtaggaggggtgatgtgtgggtgggggtgtgggtgtttttttttgttgttgttgttgtgggttttggggatgatttattgtgagtttggttgttggtttgtggtgtgtgttttgggttgttgggagtggtggtgttgggtgttgaggattggtttggttttgttgtggttgttgttggtagtaaatgtggatttgaaattgggagagagtagaggtgtttagagattgttgttgttgtgtgtttgttgtttaggtttttgtggggtatttatgtgttatagttaggtggggggataaaaatatttttttttttttgaaggatggtgaggggtaggaagttgggtatggtttgtgtgtggttttaataaataaataatttaattaaattatagatataaaaaaaagaagttattggagtggttgtgaatttatgtttttttggagttgtgttagtgttagaaatagttttggtttggagttttaattagaggagtgtagtattggtttaggggagtttaaaaagagtgatttaggggtaggggggatgggtttgtttgtgttagttgtgttatttagggggtggggttatgtaaatgagtttggggatttaaaagggtggttgtttgttagttgttgttgttgttgttgtgtgggtgggtgttgatggtagggaggggtgtgtgggaggtttgggttgtgaatttgagttgattgtttattttttgtagttttggatggaggaggtgtgggaaggtatgtgtagaggagttatgaaggagtttttggtggggggtggtgatgggtggtggtattttttttttttggtataggggttttagggagagttatttttaggggtttttagggtgtgtgggtttggttttttttttagggtgtgtgggggtggatgggggtttatgtgggtttagggggtgaagagaaatgtgtttgttagagaattttgtggtttatatgttgttttttaattaaaatagagagatggtagattttttttgggtggataggtgttagtatgtgttttttagtgttaatttgtgtgtggttgattggtgagatataagttttgtgaaatttaaatgtgaaatttgtgaaatttaaagtgttttattaatggttattagtgagttatgattaaggtggagttttttagtgaaattaatgattggtttgttggtaggtatatttaagggaggttttatattttgaggtgatttagatggtgttttggagatatgtaggtttatttggggatttgggtttttttgttgggattgtaaataaaaataaaaggtgggttagaggttgtttggaagtgttttgagggtaggggttgagtatgtaggttatttttgttatgtttggtttgtttggtgtttggtttaataaagatttgttgtattgagtgagaaggaagttaaaggggaagatggtggggagggtggtgggggaggaaagggtgtaggtggagtggtgtgttttgtaggttggtttggggtttttttgggtgtattttttgtgtttggtttttgaggtggttttttatattttttgtgatgtagggaattgaaatgtgttttagtgatatatggttgtgatttatgtttttttttgttttttttttttttttttggttagttgaggttttggtttagttttttttttagggggtgagttggtggtggaggggatgtaggaaagttttgggtttggtgtggaggtggggtggggagtggtgggttgggttttgtagttgtaggaatgtggtaggaatgtttttggtgggggtggggagtgggtggggggtgggtttagtttttatttgtgtggtgggaagtgtttggggtttgggtagtatgtgtttgattgggtgggggtgggggtgtttgggtgggaaggtgttaggggttgggagtgtgggtttaaaggggagggtgtgggtttggggttggtttggtttaggggtgggtttggaggttgttttttgtgtgttggttttttgttttatgtttaggtgaaatgtagtttttgagaagttttggggttgtttttggaggggaaaggaagttattaaagggtggtttgaggggaggggagtagagggtggtggggtttgtgaagaaggttgggggaggggtggtttgtttttttgtttggtgggtgggggtggggtgggtggattgtgttgttttttttatttttgtgttttgggtttggagtgtgtgtttagtaggttgtgagtggtggtggttggagggtgtttggttttgagtgtgggaatttttgtggtgtggtatggaggtgtgattttttagtttttagtattttgttttaggttataggttttttgttagtattttgggatttaggtttgggtttgggttgttttttagagttgtgtgtttttttattttgtgttttttaaggttgtggaggttgttaggtttgggtattgggttggtggtttggtggttggggaggtgtggagagggttttgtttgtttttttttttgggtatatttttttttgtttgtgtgggatgtgtggttgtttttgagatggggaggggagagggatttttgttttgagtgggttgtggaaaatttggttaattttttggtttatttgtagtaagttgatttgattttattttttttatttttattttttttttggtttgatttttttagtgatttgttttttattttgtattgtgtgtatttttgttagttattttaaattttttttggaaggaggtaggtataaataaatttgtaggtaaataaatatagtagtttgtttttttttaggattatttatatttttgaaatttaaataattttttatttattgatttttatttttatgttttttggattgttaatgttttgaatttattgtttttttttttttttttttttaaataagtattaagtagaagagtgagtggtagagataaaaagatgggtaggatttagtttttgttttagtgaattttatgtttagggaaattagaattaggtttgtattagagaaaattgaatagtagtataggagatgttatgttagaaaatattttatttagtagttattgagaatt

SEQ ID NO: 2786 - DNA, 2380 bp, Artificial Sequence
  chemically treated genomic DNA (Homo sapiens)
ttattttaaaaagttttgtgatttttaaggaaatagttggattaaggatgaaaaagaatattagaatttttgataattttttaaatattagtatatataagaatatagggtagttatggtagtttatgtttgtaattttagtattttgggagtttaaggtaggtggattatttgaggttaggagtttaagtatagtgtgggtaatatggtaaaattttatttttataaaaaatataaaatttagttgggtatggtggtatgtatttgtggttttagttattttggagattgtagtgggagaattatttgagtttgggaagttaaggttgtagtgagatgtgattatattattatattttattttgggtgatagagtgagattttaatttaataatataaaagaatatatatttatagatatatgtaatatatatttatttatgatttttattatattttatgtatttttggtttatatttaattgattaatagtttttaaaataatatttgtgtaaattataatttatattgtatgattaattttaaattgaaatttttattaaatttaaggatttataatgtattatatatatttttattttgtaattagaatgaagtgtgaagtatataatgtatgttggtaaggaattgaaaatttaaatttgtttttagattataaatttatttgaaaatttgtaaagttttaatagtatatgagtatatgaaggttattaatattttgaaaatagtatttagtttttgatttatttattttttattttttatttgtattagaaaaggggaataaagatgttgaatttatggttagttttttaaaggtttgttgttttttgataatgagtaaattgttttttttttaattttgtttttatttttagggaagtttttgttttaattttgagaggaaagtagaattttaattgtaaaataaaggtttttggttattttgatatatatattatttaaaagtgtaattgattttgatagtggttttgttttttaggattttttttttttttatagaatttagtatattggagagatggtagagatggtatttgatttgttgttgatgtgattgttttttttaaaatgtttagattttgatttattaatgttaaagtttttttatgagatattggtgttagggtggtattgggtaatattgttgtatgtttataaatagttgtagtgaaagtgttttggtagttggtttttgagatatagaaaagtaaaattgttatgtaagttggtaattgagtagttatgttgaagtttaatgagtgttgaaaaatagagtatgttttggtatttatagaaagaagatatgtggtgtttagaatttagtattttaaattatggaagttaattaagaaaatgttatgattttatagtattgttatataataaaagattttattttattgtagtaatttgtgaagattaatttaagaattttatgtatattagtttgttagggttgtttaataaaatataataaattgggtggtgtaaaaaataaaaaatttattgttttgtagttttggagggtgggagttttagatgaaggtgttagtagagttggttttttttgagggtggtgaaggaaagatgtgttttaggtttttttttttgatttatagatggttgttttttttttgtgtttttttatatgttattttttttatgtgtgtgtttgtatttaagttttttttttttgtgaggatattattttaatttttaatatagggaaagggaaaattttagttttagttttttttgttattgttgttgtttgtttattgttgttgttgtttgagatggagttttatttttgttatttaggttagagtgtagtggtgaaattttggtttattgtaatttttgttttttgggtttatgtgatttttttgttttagttttttaagtagttgggattataggtgtttgttattatgttaggttaattttttgtatttttagtagagatagggttttgttgtgttgggtaggttggttttaaattgttgattttaggtgatttatttgttttgtttttatgttaaataagggtagaagaaaaaagttaattgaaggttataaatttaggggtataggtttattgaaagattgagatttaattataggattaatttgatttagtgtttattgtattttagtataattttattttaattaattagatttgaaatgattttttttttaaaaaagttatattttaagatattgatagttaggattttaatatataaatttttggaatttatatattttggaatgttaatataagatatttaaataattttaaaattttattattatttttatgtgaatatt

SEQ ID NO: 2787 - DNA, 2380 bp, Artificial Sequence
  chemically treated genomic DNA (Homo sapiens)
aatatttatatgaaaataataataaagttttaaaattatttgaatgttttgtgttgatattttaaaatatatgaattttaaaaatttatatgttgaagttttaattgttagtattttagaatgtaatttttttggaaaaggggttattttagatttaattagttaagatgaagttatattggagtatagtgggtattaaattgaattggttttatgattgagttttagttttttagtgagtttgtatttttgggtttatgatttttagttggttttttttttttgtttttatttggtataaaaataaagtaggtggattatttgaggttagtaatttgagattagtttgtttaatatggtgaaattttatttttattaaaaatataaaaaattagtttggtgtggtggtgggtgtttgtaattttagttatttgggaggttgaggtaggagaattatatgaatttgagaggtggaggttgtagtgagttgagattttgttattgtattttagtttgggtgataagagtgaaattttattttaaataataataataataaataaataataatgatgataaaaaaagttagagttgggattttttttttttttgtgttaaagattagagtggtgtttttataaaaagggaaaatttggatataggtatatatatggggagaatagtatatgaagagatatagggagaaggtagttatttatgggttaaggagagaggtttggaatatattttttttttattgtttttaggaggaattaattttgttgatatttttatttgggatttttattttttagaattgtaaagtaataaattttttattttttatattatttagtttattgtattttgttaggtagttttagtgaattaatgtatatagagtttttgagttaatttttataaattattgtaataaggtagggttttttgttatgtaataatgttatgaaattatagtgtttttttaattaatttttgtagtttaaggtattaagttttggatattatgtgttttttttttataaatattaggatatgttttgttttttagtatttattggattttagtatgattatttagttgttagtttatgtggtaattttgtttttttatgttttaagagttagttgttaggatatttttattgtagttgtttatgagtatgtagtgatattgtttaatgttattttaatattagtgttttgtgaggaggttttggtattaatgaattggaatttggatattttggaaggagtgattatattagtagtagattaggtattatttttattatttttttagtgtattggattttatgagaaaggagggggttttaggagatagggttattgttagggttagttatatttttagatgatatatgtattagagtagttaagaatttttattttatagttagaattttattttttttttaaaattagagtaaggatttttttaaaagtaagaataaagttaagaaaagaataatttgtttattattaagaagtagtagatttttgaggaattggttataaatttaatatttttgttttttttttttggtatagatggaggatggaggataaatgggttagggattaggtgttatttttagagtattagtggtttttatgtatttatgtgttattaaggttttgtaggtttttgaataaatttataatttgaaaataaatttaagtttttaattttttgttagtatgtattatatattttatattttattttaattataagataaaagtatatgtaatgtattgtgagtttttaagtttagtgaaggttttagtttgaagttaattatatagtataaattgtggtttatataaatattattttaaaagttattgattgattaggtgtagattaggaatatatgaagtgtgataaaagttatggataaatgtgtattatatatatttataaatatatatttttttgtgttgttgagttaaggttttattttgttatttaggatggagtatagtggtgtgattatgttttattgtagttttgattttttgggtttaggtgatttttttattatagtttttagagtagttgggattatagatgtatgttattgtgtttagttaagttttgtattttttgtagagatgggattttgttatgttgtttatgttgtatttgaatttttgattttaggtgatttatttgttttgggtttttaaagtgttgggattataggtatgagttattgtgattgttttatatttttatatatattaatatttaaaaggttattaggagttttgatgtttttttttatttttagtttaattatttttttgaaggttatagagttttttaaggtga

SEQ ID NO: 2788 - DNA, 2405 bp, Artificial Sequence
  chemically treated genomic DNA (Homo sapiens)
tagttaaaatttttgaagtatatatttttttaaatttttaaattttaaattatgtttggttttttagttttatttttgtttgagtttaatattagtattttattattatatatggtgtaaggtttttttttgatatattttatttatattttaagaaataattttattattttttataaagtatgtgaaattataggtattaaatatatatgtttatttaaattttaagattaatttatttatatgttatatttaattatgagtattttgtgaaattattatatttgaaaggaaattttttaaaatgtattttaattagttagattgatgttatttggatttaaataggaagattatattttttttgtttgtaatgtaatttttatttttatgtgtaatttttaatataattaatatatataaatttagtttgagatagttttgtttatgttatttagattggagtgtagtggagtaattaatttttgtttattgtaatttttgttttttggatttatgaataatttttttattgtagttttttgaatagttgggattataggtttgtattattagatttagttagtttttgtggggatagggttttaattatgttaatggttaagttttaggtttgaatgatttttttgttttaatttttattgaagtgtaagtattgattgtttataagtgttaagttattttgtttagtgatatatataattaaaattattttaaattaatggttgatggaatgttttttgaaaatttagtttttgtatatttttgaaatgtgtttaaatgggtatttgtgataggtaagtaagatggttggttaatagtagtaatgttttgtaatgtatagtttttttttgagatggtaggtggttttgaaaagagttttttgttttttttgatatagaagtttttttattaatgataattttaagttatttgttttgggttttatggtggtgatttttagtttttttgggtagtagtattgtttgaatgttaggtaggattttgttttgggtaatggttatgttgtttaaaagtttattgagttttttattattgtggattgttagttgtaggtggtggggaataatgtgagtttttttgttattgtgagatgtattgtttgttagtttaaggatttttgttgtgagatattttaatattgttgttaaatatattggtgtgtttgtttttatttgttttgtatagttttttttatgaagtagatgatggatttggtttatgggaaattgtaaatttgttttagaagagtgagatttagatttggtgtgtgttttttttttttgttttttttgtttagatatttttttgtattaaattgtagtaatatgagaattatatttttagggttgttattgggtttatttatagtttgattgaggttggtatttgttatttgattggttgatggttgtttatttaattagaaagttgtattagaattgttttatttgtatttatgttattttttattgtttaattagattttggatattgaatgtggtgtttgagggttgtgtttataaatattgtattttttattttttagttttgtttgtttatttggtgagatttggagttgaggttatttggagttgtttaatattgaagagttgttgagtattggaaagtgttgtgtaattttggaaaagaattgtgtaatgttgtagaagtgtgtggtagttatgttggaggtgttatttaaaggtgttattatttttaagaagggttttaagaaagttgttgttaagatttagaaaaaggaaggtaaaaagtgtaagaggatttgtaaggagagttattttatttatatttataaagtgttaaagtaggtttatttggatattggtatttttttgaaagttatgagtattatgaatttttttgttattgatatttttgagtgtatagtgagtgaggtattatgtttggtttattatagtaagtgttttattattttttttagagagatttagatagtagtgtgtttgttattgttgggagagttggttaaatatgttgtgtttgagggtattaaggttgttattaagtatattagttttaagtaagtttgttaagtaaatgttatttttaatttaaaggttttttttagagttatttaaatatattgaaatagttgtgggttttgtttttgtgtagtttttaattgtaagggttttttttttttttgaggtggagttttatttttttaggttggagtgtagtggtggaattttggtttattgtaagttttgttttttgagtttatgttatttttttgttttagttttttgagtagttgggattataggtttttattattatatttggttaatttttgtatttttagtagagatggggtt

SEQ ID NO: 2789 - DNA, 2405 bp, Artificial Sequence
  chemically treated genomic DNA (Homo sapiens)
aattttgtttttattaaaaatataaaaattagttgggtgtagtggtgggagtttgtagttttagttgtttaggaggttgaggtaggagaatggtgtgaatttaggaggtagagtttgtagtgagttgagattttgttattgtattttagtttgggagagtgagattttgttttaaaaaaaaaaaaaatttttatggttagaaattatataaaaatgaagtttatagttgttttagtatgtttaagtggttttgaaaagagtttttgggttagaaatgatgtttatttagtaggtttatttggagttggtgtatttagtgatagttttggtgtttttagatatagtatgtttagttagtttttttggtagtagtaagtgtattgttgtttgaatttttttggaagaaatggtggagtgtttgttgtagtgagttaaatgtgatgttttgtttgttatatgtttaaagatattagtgatgaaggaatttataatgtttatagtttttgaagagatgttagtgtttggatggatttgttttagtattttgtagatgtaaatagaataattttttttatgggtttttttgtgttttttgtttttttttttttgggttttaatgatagtttttttaaagttttttttggaaatggtagtatttttagatgatatttttggtatagttattatatatttttgtagtgttatatggtttttttttagggttatatagtattttttagtgtttaatagttttttagtattaaatagttttaaatgattttagttttaagttttgttaagtaaataaatagaattggaggatgaaagatgtggtatttataggtatggtttttaaatgttgtgtttggtatttaaaatttgattggataatgggaagtggtgtgaatgtaaatgaggtgattttagtatgattttttgattgggtagatggttattagttaattagatagtaaatgttaattttagttagattataaataggtttagtagtagttttagaaatgtggtttttgtgttgttgtaatttgatgtgaggagatgtttggatgagggaagtagggaggaaaagtatgtgttaagtttaagttttgtttttttagagtgggtttgtagttttttgtaggttggatttattgtttgttttgtaagggaaattatgtagagtggataggggtaggtgtattagtgtatttggtggtagtgttagagtattttatagtagaaatttttgagttggtaggtaatgtgttttgtgataataaaaaaatttgtattattttttgttatttgtagttagtgatttgtaatgatgaggaatttaataagtttttgggtggtgtgattattgtttagggtggagttttgtttaatatttaggtagtgttgttgtttaagaagattgagagttattattataaagtttaaagtaagtaatttaaggttgttattggtaaaaagatttttgtgttagaaaaaataaaaggttttttttagagttatttattgttttagaaaaaggttgtatgttataaaatgttattgttgttaattagttattttatttgtttgttataaatgtttgtttaagtgtattttgggaatgtatggggattgaatttttaaggagtgttttattggttattagtttgaggtaattttggttatatatgttattgggtgaggtggtttaatgtttgtgagtagttagtatttgtattttagtggaggttggagtgggagggttgtttaagtttggggtttgattgttaatataattgagattttgtttttatagaaattagttgggtttggtgatgtaggtttgtagttttagttgtttgggaggttgtggtgggagggttgtttatgagtttgggaggtgaaagttatagtgaatgaagattgattgttttattgtattttagtttgggtgatatgagtgagattattttaaattagatttatgtatgttagttatgttaagggttatatatggaagtgaaaattgtattataagtaggagaggtgtaatttttttgtttaaatttaggtaatattagtttggttggttaaagtatattttagagaatttttttttaaatatggtagttttatgaaatatttataattaaatgtggtatgtaagtaagttaattttaaaatttgggtaagtatatatatttgatatttgtggttttatgtattttgtaaagaataatagaattattttttaaaatgtaagtaaaatatgttaaaaagaagttttatgttatatgtgatggtgagatattagtgttagatttaggtaggaatgggattagaaggttgaatataatttgaagtttagaaatttggaagagtatatgttttaaaagttttgattg

SEQ ID NO: 2790 - DNA, 2500 bp, Artificial Sequence
  chemically treated genomic DNA (Homo sapiens)
tagtgtttattaaattttatattggattaagtgtttatttttttgttttttatgtaagggttgttaaatataattaataaattttagtgattaattgggttaaatgagagatgtaataaattttttatttttttatggaatttaaataatgttttaaatttattaagtaaggaggtaagtttatttgattattttttttataatttaatgtagtaattattaaattgttaatggatatattgttgtaatatttgatgtagtaatttgaaatagtattttagtaaaaattatatttagatatattttttttttaaagaaaagtagttttaatagaagtttttatagttttaataaaattattggtttgttttaattttattttaggagggttgtgaggaaattataaatatatagaattgaagtagaggtattggtttaagtttaattttagaaagtatttttaaattattaatagtttggtttgtattgtaaatagtaaatgtgttaatgttatgtttatttagaaattattttaaattgtatttattgataattaaattagaatttaaataatgtattatttaatagttttgaaatatttaatttaatatggagtgtagtaggttttgataggtgttgggaatttagttaatgatttatgaggttattatttagtatttttagtaagaagaaggttgtattttaatgtttttttgtttggatttgttatttagtttttttttaattaggatagggtgtatatataatttttaggttttatttgtgtttataaaatttggttaaaatgattttagtgtgttttttatatttttttttatattttgaggatatttaatgagtttttttggttgtatttaatattatttttaggatagggagaaatttttatgttagatttagtgatggaagtagattttttagtaattgagatagtttattgttgttgagaggaagatattgttaatggtgatatttgtttgatttatttgtgttggtggaaatggtaatgtaggtattgtttgagggagttttagaaattattgttttggggtagaatttgtaattattttgtgtggttttttaaaatgttttttattttttgtttttgaataaaatgtttttataaggaaatattagggagaatttgggtttattgattgtatgttttaggtattttttttggggtaggtaagtagggggttgtgtttttttttgtgttggttgtgtggttttttattgggatttttttgatggtgtgaggtaaggagtggattgagaggtttttgagttttgagttgagtgtgtgtgggttgtgtaggaggtttttgtgttgtttgtagtttttgtgaggatttaggtttgatagttggtgaggtagtttttggtgtgtgtgtaggagtttagatttttggttttgtttttggttgggttagtttgggtgttgtggttgtggttgggtgtgtagggggtttaggttgtaggggttgttgatgtgggagtaaggattttgtgattgggggtagataggttggtagggtggggggaagtatgggggttggaagttggtattgggggtgtgggatagtggtggggtgtttgtgtagggagattgatttatagtgtttagttggggtaattgtgttgttttgttgttggtgttgttgtgatggttttagaagagagtgagaggaaaggtaaagaataaggaattaggtgttgagttataattatttatataaaatttatttgataagtttgtgtgggaaattgtttgtttttgttggttggttgttgggaaaaaattagttttaagttttttttaggaaatatttttaagtgaaatagattgaataatgtagagaaattgtatatggagggggtataagagattatttaggggttttttttaaagagaggaaaagatagaaaagggttttttggaatatagtttattaaattgtagtgtgaaattttttttaagtaaaattaaaattttttttaaatattaaatagtagaagtggttttttttttttttttgatttgaatttgtttgttattgtgttattgtttatttttttttatttatttggagagaaaaaaattataaatgtttaaagattgttattgttttatgattatttaaatagaaatatattttgtagaggggttgtaataaaaatatatgtttaaattattagtttaaagaaggttttaattgtaggattggggtttgttttttttgttttttttgttaggagttttttttttgatagagttgatttatggtttggatagggaaagggggatgttaagttaaggtttaaaatagaaagatttagttttattgggtttaaaagagagaggtgtattttggggttgtggttttttttttttgttttttttattttagttttaaagggtagaagaaatgtttgattttaggtttttttattgtaatttttttgtaaaataagtgaa

SEQ ID NO: 2791 - DNA, 2500 bp, Artificial Sequence
  chemically treated genomic DNA (Homo sapiens)
tttgtttgttttgtaagggaattgtaatagagaaatttaaagttaggtgttttttttgttttttggggttggggtggaaggggtggggggggggggttatagttttggggtgtattttttttttttaaatttaataaggttgaatttttttattttaaattttgatttgatgtttttttttttttatttaaattataaattgattttgttgagaaaaaggtttttaatagaggaagtgaaaaagatagattttgattttgtagttaaaattttttttaagttggtaatttaaatgtgtgtttttgttatagtttttttgtgaaatatgtttttatttaagtagttatgaaatggtaatagtttttgaatgtttatgatttttttttttttaaataaatggaagagaataaataataatgtagtggtagataggtttaaattgggggaaaagaaaaggttgtttttgttgtttagtatttaggaggaattttaattttgtttaagagagattttatgttgtagtttaatgggttgtgttttaggagatttttttttatttttttttttttttgaaagaaatttttaaatagttttttgtgttttttttatatatagtttttttgtgttgtttggtttgttttatttgagggtattttttgaaaagaatttagagttgatttttttttggtggttagttaatgggaatgggtgattttttatgtagatttgttaagtggattttgtgtggatagttgtagtttgatgtttgattttttgttttttatttttttttttgtttttttttaggattgttatgatggtattagtaatgggatggtatggttgttttagttgggtattgtaggttaatttttttatatgagtgttttgttgttgttttatatttttaatgttgatttttagtttttatatttttttttattttattagtttatttatttttagttgtaagatttttatttttatgttaatgatttttatagtttgaattttttgtatgtttagttgtagttgtagtatttaggttggtttggttagaggtagagttaggagtttgggtttttgtatatgtattgggggttgttttattagttgttgggtttggatttttgtagggattataggtggtatgaggattttttgtatggtttatatgtgtttagtttaggatttggagattttttgatttattttttattttatgttattgaggaggttttggtaagaggttgtgtaattagtgtgggagggaatatagttttttatttatttattttagaaaggatatttggaatatatagttggtgggtttgggttttttttagtatttttttataaaaatattttatttggaggtggagagtgagggatgttttgaggaattatataaagtagttgtgagttttattttagaataatggtttttggagtttttttaaataatgtttgtattattatttttattaatatagataaattagatgaatgttattattaataatattttttttttgatgatagtaaattgttttaattgttaaaagatttatttttattgttgagtttggtgtggagatttttttttgttttgggaatgatgttaaatgtaattaaaagagtttattaaatgtttttaaaatgtaaaaggaagtgtaaaagatatattaagattattttaattggattttataagtataagtgaaatttaaaagttatgtgtatattttattttgattaaagaaaaattaagtagtaaatttaagtagagggatattaaaatgtagttttttttttattaggggtgttaagtggtgattttataaattattagttaggtttttaatgtttattagaatttgttatattttatattaaattaaatgttttgagattattgggtaatatattatttgagttttaatttagttattaataaatgtagtttaaaatgatttttaaataagtatggtattagtatatttattatttataatgtaaattaggttattgataatttgaaaatattttttggaattaaatttaaattagtatttttgttttaattttatatatttatggtttttttataatttttttgaaatggaattagagtaagttaataattttattaaagttgtaaaggtttttgttaaagttgtttttttttggagaggaaatgtatttggatgtgatttttattaaaatgttattttaaattattgtattaaatattgtagtagtatgtttgttgatagtttaatgattattatattagattgtaaggaaaatggttagatgaatttatttttttgtttggtgaatttaaaatattatttaagttttgtaggaaaatagaaaatttattatattttttatttggtttagttagttattgaaatttgttggttatgtttagtagtttttgtatggaaggtaggaaagtgggtatttgatttagtataaggtttagtgagtattg

SEQ ID NO: 2792 - DNA, 2475 bp, Artificial Sequence
  chemically treated genomic DNA (Homo sapiens)
ggggggttgtaaggtttttttttttttatgaggttgtattttaggttgttttagtggggggaaatttggataatatttaggtttttttgggtaggggtttttgtggttttttgtagtgtattgtgtttttagttaatagagaatggagaatggtgatgatttttataaagtatattgtttgtaaatatatttttattaaggtatattttgtatagttttagatttattaaattttgatttaatatagtatatgtttttgtgagtataaggttgggataaaagttatagattaatagtattttaaagtagaataaaatggagttttttatgttttttgttttttatatagatatagtaataatttgattttttttttttttttttatatttattttattatatgatattaatattgatttttttatgtaaaatgttagttttaggttttttttatttttgtgttttgtttgtgtttttaagggtgtaattttttgttttttttttttatagttagtgtgtgtgtgtgtgtgtgtgtgtgtgtgtgtgtgtgtgtgtgtgtgtgtgttatattttgatatattattagaatttaaattaatttattttgttatatttttttgttattgataattttttatttagttatgttataaatgtattttttaaagtaagtgtttgaagagatagggttttattgttgtttaggttggagtgtagtgttgttattatagtttattgtagttttgatttttttggtttaagtaatttttttgttttaattttttgagtagttgagattatatgtgtgtgttattatgtttggtatatatttattttttattatttgtgtttgtatgtgtttagaggtatagataatattaaaatgaaaagaggtggtagagaataggaagagaaagaaattagaggagttgatatttttaaatgttgtggtttttaaggattgttagtaggttgtggggttagttagaaaaaatagagtttttgattttagaaggtttggagaaagtgtgagaagggagattagattagaatagattgatggaagggaaaggtggtgagggtgaagtaagagaaatttggttttagtgaaaaggatttattattgtattttagaatgtaatttgtattttatatgtaaatgaggaggttttttagaggttggattgggttgggtttagttgagtttttgtaaatagtagggatttaattttggggaattgtagattaaagtgagagagggatgtattgtatttttaggtatatttaaaaaggatggatgagatattgaagtagaggatataggaggattaaaggatttaggaaagtaagtagttttttggagaagttgttgaaatttaagattggtaagagaagtaaatttaattttttatattgattattttttattttttgaaaagaagagattgtttttttagggaagtgaaaataatgaatttttggaggtattgtttttttgtttttattttgtttagtgtggttatttttgtgagattttatagtagttaattgagtttgttaaaaagttatgagaagttgaatagttttagtgaaaggtattttaggaaaattgtttgtaattatgttttagagaaaatgttagtttttttgtgggaaaatatattattattatttttgtgaagtgttttttgtaaggattatttgatttagaattattatattataagttttttgttggaagaagaggttgtattttttttggtttatgttatggttatttataaggattttgatatttttgaaaggttttttagggttatttatatgttttaaaatgtttattgtgtttatgtggatgagaaagttttagttgagtataaggaatttgtgaggtagttattgagttgtttttaaaatgtttttattgttttaaagatagagtttgtggtttatgtaggtatttttagattttaggttgatttgaattgtttgaaagattttgttgtttttgaggttttttggaagtatgttattaatatttgtggataagatttttttttgaaaattaattgggagatagtttagtatttgaaaggatttaaagggaaaaatattattttaggggtgttgttttttgattatgtaattaagtgaattaaatatgtttattaagagtatatagataaaggtggtttttttgtgaaaaatattaatattttgaaaattttatttttatattagttgattatttattttggtattgtttatgtggtgtttattagagattttgttgattttgttttatgtgattaaagggttattgatttattataatggttaaaagatatttatagttttgatgagtatttttgggtgatatttaatagggttttaggtaggtattaatttttattttgattgatagattgagtttgttaatattttgtttgtttagagaattgatttatttgaaat

SEQ ID NO: 2793 - DNA, 2475 bp, Artificial Sequence
  chemically treated genomic DNA (Homo sapiens)
attttaaatgagttagttttttaggtgagtagaatgttagtaaatttaatttattaattagaatggaaattagtatttatttgaaattttattaagtgttatttagaaatgtttattaggattataggtattttttgattattgtagtagattaatggttttttggttatgtagaataaagttgataaagtttttggtaagtgttatataggtagtgttaaagtagatggttagttgatgtggaggtgaagtttttaaaatattagtattttttataaaaaagttatttttatttgtatgtttttggtggatatatttagtttgtttaattgtatggttaggaggtagtatttttggggtgatatttttttttttaaatttttttagatgttgaattattttttggttggtttttagggggaagttttgtttataggtgttgatgatgtatttttagggaattttagaggtgataaggttttttagatagtttaggttagtttggagtttggaaatgtttgtataaattatagattttgtttttgaagtaatgaaagtattttggaagtaatttagtaattgttttatagattttttatatttagttggggtttttttatttatgtgaatatagtagatattttggggtatatagatagttttaaagagttttttaaaggtgttaaagtttttatggatgattatgatataggttaaagggaatgtagtttttttttttgataggggatttgtgatgtagtgattttgggttaggtaatttttgtaagggatattttgtaaaggtgatggtaatatatttttttataaaaagattggtattttttttaaggtgtgattataggtagtttttttaaaatattttttattggaattgtttagttttttataattttttggtgggtttaattggttattgtaaaattttataaaaatgattatgttgagtagagtgaaagtaaaaaagtagtatttttaaaagtttattatttttatttttttggggaaataattttttttttttagggaatgagaaatgattggtgtgagaggttgaatttgttttttttgttagttttgaattttgatagtttttttggagggttgtttgtttttttgaattttttaatttttttgtattttttgttttggtgttttgtttattttttttggatgtgtttggagatgtggtgtgttttttttttattttggtttgtagttttttagggttgaatttttgttgtttgtaaaggtttagttaagtttagtttagtttagtttttaggaagtttttttatttatatatgaaatgtaaattatgttttggaatgtaatgatgggttttttttattggagttgagttttttttgttttatttttattgttttttttttttattaatttattttgatttgatttttttttttatgttttttttaagttttttagaattagaggttttgttttttttggttagttttataatttgttggtagtttttaggagttatagtatttaaggatattggtttttttggtttttttttttttttgttttttgttatttttttttattttagtgttatttgtatttttgggtatatatagatatagataatgaaaaatgaatgtgtgttaggtatggtggtatgtatgtgtagttttagttatttaggaggttgaggtgggaggattgtttgagttaaggagattaaggttgtagtgagttatgatggtagtattgtattttagtttgggtgatagtgagattttgtttttttaaatatttattttaaaaaatatatttgtaatatgattaagtagaagattattagtggtagaaaaatataataaggtagattaatttagattttaatgatgtgttagaatatagtgtgtatatatatatatatatatatatatatatatatatatatatatatattgattatgggaagagggaataaagaattatatttttgggggtataggtaggatataagggtggaaggaatttaggattgatattttatatgaaagagttagtgttgatattatatgatgaagtaaatgtggggaaaagaaagagagattagattgttattgtgtttatgtagaaaatagaagatataagaaattttattttgttttgttttgagatgttgttaatttgtaatttttgttttaattttgtgtttataaaaatatgtgttgtattgaattaaggtttaatggatttagggttgtgtaggatgtgttttggtaaaaatgtgtttgtaggtagtatgttttgtaaaagttattgttattttttattttttattaattagagatataatgtattgtggaaggttgtaggaatttttgtttaagaaagtttgggtattgtttaggtttttttttattgagataatttgagatatggttttgtgggaagggaaagattttatagtttttt

SEQ ID NO: 2794 - DNA, 2426 bp, Artificial Sequence
  chemically treated genomic DNA (Homo sapiens)
ttaatttttgtatttttagtagagatggggttttattatgttgtttagaatggttttgattttttgattttatgatttatttgttttagttttttaaagtgttgggattataggtataagttattgtgtttggtttaagggataatttttaagattttttgtggatgttggatattattgttagtattaaataatttgattattattaattagaatttatttttgtttttattttttatttataattgtaatgttttttttattttaattaagtatttattatatattatggttataatttttgtagtttgaggtatgatagtaaaattagtatatattttattttttttttttatatttttatagatggaagagttttttttattatagattatagtaattttggtatatgatttttttttttttttattaagttaagaatttttattttgattttttatttaaaggaagtattttatagtttttttttggtatatttaaatttttaatattattatttttgtattttggggttgttgttaagtaaaataagggtgatttgaatataagtattgtaatattaggatatttgatttgagatttgagttaattatgatgtaattaatagttggggattgtgtatagtatgggtatattggataagaggataattttattatattattgagaatggtatgtagtttaaaatttatgaattgtttatttttgaaattttttatttaatatttttggattgtggttgattttaggtaatagaaattaaggataagtggggggtattatatatatatatgtatatatgtatgtttatttgtatatgtgtgtgtatatgtatatatgtgtatttttatatatatatatatatatataaagatatagaaggatatatagtagggattttaaattggtggtttttgaagtggaaattaatatttaaaatttttttgatttttgaatttgtttatatttgattttgtattttttattattttatagatttagatatttttgattttttaatgttaaagtttatatatttgtattaatatttatataaattaatttattttatgtatatatttatattaattttattattatttaatttatatttatattaattgtttggttttataagtatttagtttgtgattttgaatatgtttaggtattaattatggttttttttaggttatgagttgtttttaatttttttttttttttggtttgttttgtttaattttgttaaaataaataaatatggtttttgtaataatggagaaagatgttattttaattaaaaagtaataataatgtggtttgtggttttttgggttgtttgggttatgttttattggtttttattgagtttggtttttttgggttgttgttttttttgtttttttagtttgttttaaatgtgttgttaagtgagtggttggggtttttttttttttttgtgattggggtttagtgagagttggtggttggatattgtttgaagaatgggttttttttggaagtgtttggaaatttagttggggtttgaggtttttttaaatgttgaatttaagtgtggggatttagtttttggaaatgttaattgttttattttgattgggattgttgatagatatattgttttatgttaatgtggtattattataatatagttttatttttagttattgtaagttattaagataatatttggtttgaatttttttttattatggtttaaaaaaataaaagttgaaatttaaattatttttttaatattttgttttttttttttttttttttttttttttttttttttttgtattttagaaattttaaatgagggggaggagtttagaaattgtttattttatgtgtttttttttttattttatagatggggatgttgaggtttagggaggagtagtgatttgttatattataaattttgttaaggtaagtagtttaagttttttaggttttttatttgtaagttaggatggtattgatttttttttatattatttttaagggatttttttaaggggtagataggatggggtatggtgattagtaaggagtttaggtaagtattagttgttgttattgtttaagggtttttagttaattggtagtagaattaggtttttttagaatttgagttttttgatttttaatggtaatgtattttataatttatttgggaggaaggattaagattataatattaatattttttaatgtgttggatgttttattaagtgttttatgaatagtgtaatattatagaggagagtaatgtgttggagtttagttatgattttgagtaagtatattatttttgaaatttttttttatttgtgaaaaatggaaatagtaatggggtaatgagattgttaagagga

SEQ ID NO: 2795 - DNA, 2426 bp, Artificial Sequence
  chemically treated genomic DNA (Homo sapiens)
tttttttaataattttgttattttattattgtttttattttttataagtggaaagaggttttaagagtgatgtgtttgtttaaggttgtagttgggttttagtatgttgtttttttttgtgatgttgtattatttataaaatatttagtggagtatttagtatgttagaagatattagtgttatgattttagtttttttttttgagtaaattgtagagtatattattattggaaattagaggatttagattttagaaagatttaattttgttattaattaattagaagtttttggatggtggtaatagttaatgtttgtttaggttttttattgattattatgttttattttgtttgttttttgagggggttttttaaaggtgatgtggggagaggttagtgttattttggtttgtagataagaaatttgggagatttgagttgtttattttaataaggtttgtgatatagtaggttattgtttttttttgggttttagtgtttttatttgtaaaatggggagaagggtatataagatggataatttttaaattttttttttttatttgaagtttttggagtgtaaaagaaagagaaaagggagaggaagaaaaaagagagatagagtgttaaaggagtggtttggattttagtttttatttttttaggttataatgagaaaagatttaaattagatgttgttttagtgatttgtagtagttgagagtggaattgtgttgtgataatattatattagtatgaagtaatatatttattaatagttttagttagagtaaagtagttggtatttttagggattgagtttttatgtttgagtttagtgtttgaaaggattttagattttaattgggtttttaaatgtttttaggaagggtttattttttagatagtatttaattgttagtttttattggattttagttatagggaaaggaagggattttagttgtttatttggtgatatatttgaggtaggttggggaggtaggaagagtagtagtttagaaaagttaggtttagtgggggttagtggagtgtggtttaaatagtttagagggttataggttatattgttattattttttaattaaaatggtgtttttttttattattataaaagttatgtttgtttattttagtaaaattagatagggtagattaggaaaaagaaaaaattaaaaatgatttatgatttagagagaattatagttaatgtttgggtatatttagagttatgaattaaatgtttatggggttaggtagttgatataaatgtgaattgggtggtagtaaaattaatataaatgtgtgtatagggtgagttaatttatataaatattaatataaatatgtgaattttgatattaaaaaattaggaatgtttgaatttgtgaagtaatggagaatataaagttaggtgtaaatgaatttaaaagttagagagattttaaatattgatttttattttaggggttattagtttgaaatttttgttatgtatttttttatatttttatgtatgtatgtatatatgtaaagatatatatatatgtatatatatatatatatatagataaatatatatatatatatatatgtatataatattttttatttatttttggtttttgttatttaaggttaattatggtttaaaaatattaaatggaaaattttagaaataaataatttataagttttaaattgtatgttatttttagtagtgtgatgaaattatttttttgtttagtatatttatgttgtatatagtttttgattgttagttatattgtagttggtttaggttttagattgaatgttttggtgttgtagtgtttgtgtttaagttatttttattttatttagtaatagttttaaagtgtaagagtagtgatgttgggaatttggatatgttaaagagaagttgtaaagtgttttttttaagtgaaaagttaagataaaagtttttgatttaatagggaaagaaaaaagttatatgttgaggttgttatgatttgtggtaagaaagatttttttatttatgaaaatgtgaagaaggaaaatgaaatgtatgttaattttgttgttatattttaaattgtaaaagttatggttatagtatataataagtgtttggttaaaatggaaaaggtattataattgtgggtggaagataggaatagaaatgagttttgattgatggtaattaggttgtttggtgttagtggtagtgtttggtatttatagggggttttagaaattattttttgagttaggtatagtggtttatgtttgtaattttagtattttgggaggttaaggtaggtggattatgaggttaagagattaagattattttgggtaatatggtgaaattttatttttattaaaaatataaaagttaa

SEQ ID NO: 2796 - DNA, 2422 bp, Artificial Sequence
  chemically treated genomic DNA (Homo sapiens)
ttgtttaagggttataattttttatggttttaggttttttatatgtaaaattaggataataatgttttttattttatgaggttatttaaaggaaatggtgagattatgtgttttgatagaatatattttaaagtttttattatggtttttgatatataggaggtgtttaggaaatattaggtattattgttattgtaataattaggaaaatttttgttattatttatatgtgatagaattgagggatattagatttggaaagtagttgggttattgttttggatgatttgtttattttatgtttgaggaaattgaggtttagtatgtttgtttaagtttatatagttaattagtggtggagttaagaatagtatgagtttatattgaaaggaggttagttgtgtttatattaattttatttaatttttttaattaagttgttgatttttttagtgatgttatttatttgttttagaaatgagttatataagtgtgtttttttttattatttatttgttttttttgagaagagtattgggttgttttaaaataagtaaagatttgagagaatatttttgttttattgtttttgttttttgttgttgatttatttatttttgggtttttgagtttgtttatattaattatttatttttagaagaatatattgtgtttggttttataggttttgtgtagttggagttttgtaatgttatttttgggaggttttattgtaatgtaaggaaaggttattgttaggtttttttttttgtatagagtatggtatttagttaatgattatgtttagttaaaaatttttttggtttttaaaatttaagttaggtaattttaagaggaatggtatttaaatagatgtgttttttaattatatagttttaaaataattggataaaaagaatatttgttttatttttttattattaggtatttaaatttagttttaaataggtatataaatagttgggtattttaggttgatgatatttatttttagggtaagtggttaattttttttttaagtttgaataataaatgtttaattatttttttattttttttaaatagtaatgtgttttgtatttagtttgtgtttgtttgttggtgtagagttgatattatttgattttattttatagagattttgtgtttgttagatgtttaaataagtggttgatttagggtaaaaatattagttaagttatttgttttatttagttaaagaattagtgtaggtaaagtaggtgagttagtagtttagtgtaggtaaagttgtgtgtttttgaatgatttttttagttgttatttttgggagggttgggtttttggggtatttttaaaggaattgttttgggtttaaggtaatatttttttttagtagtttttttttttttatttttagtggttattttaattattttaataggtaattttaaagttagttagaagtaattttagtttattaagtttgaatgtgaaaaggagtaagtaaagatttgagtttttttttgtttttttttttatgagtaatatgtgattttttaaaaattattgtagtaagaatatttaatatgaaatttatttttttaataaatttttaagtgtatatgagtttttaaaataaaataatttgattttttaatgattgttattttaattggtgtgagatggtatgttattgtggttttgatttgtatttttttaattattagtgatgatgagtttttttttatatgtttgttggttgtataaatgtttttttttgagaagggtttgtttatattttttttttagtttttaatggggttgttttttttttgtaaatttgtttaagttttttgtagattttgtatattagttttttgttagatggatagattgtaaaaatttttttttattttgtaggttgtttgtttataatggatgttagagaggatgtggagaaataggaatatttttatattgttggtgggagtgtaaatgagtttaattattgtggaagatagtatggtgattttttaaggatttagaattagaaatattatttgatttagtaattttattattgagtatatatttaagggattataaagtattttattatatagatatatgtatatatatgtttattgtagtattatttataatagtaaagatttggaattaatttaaatgtttattaatgatagattggataaagaaaatgtggtatatatatattatggaatattaagtagttataaaaaaggatgagtttatgttttttgtagggatatggatgaagttggaaattattatttttagtaaattaataaaggaatggaaaattaaatattgtatgtttttatttataaataggagttgaataaatgagaatatatggatatagggaggggaatattgt

SEQ ID NO: 2797 - DNA, 2422 bp, Artificial Sequence
  chemically treated genomic DNA (Homo sapiens)
gtgatgtttttttttttgtgtttatgtgtttttatttgtttaatttttatttatgagtgagaatatgtggtgtttggttttttgtttttttgttagtttgttgagaatgatggtttttagttttatttatgtttttgtaaaggatatgaatttatttttttttatagttgtttagtattttatggtgtatatgtgttatattttttttatttagtttattattggtgggtatttgggttggttttaagtttttgttattgtgaatagtgttgtaataaatatatgtgtgtatgtgtttgtatagtagaatgttttataattttttggatatatatttagtaatgggattgttgggttaaatggtatttttggttttagatttttgaggaattattatattgttttttataatggttgaatttatttatatttttattaatagtgtaaaagtgtttttatttttttatattttttttggtatttattgtaaataggtaatttatagaatgggagaaaatttttgtaatttatttatttgataaagggttaatatatagaatttataaggaatttaaataaatttataagaaaaaaataattttattaaaaattgggagaaggatatgaatagattttttttaaaagaagatatttgtgtggttaataaatatatgaaaaaaagtttattattattggtgattagagaaatgtaaattaaaattataatgatatattattttatgttagttagaatggtgattattaaaaagttaggttgttttgttttaaaggtttatgtatatttaaaaatttgttaagagggtagattttatgttaggtgtttttattataataatttttaaaagattatatgttatttataagaaaagaaataagagaaagtttaggtttttgtttgtttttttttatatttaagtttgataaattaaaattgtttttggttggttttaaggttgtttgttgaagtagttgagataattattggaaatggggaaggagaagttgttgagagagaatgttgttttgagtttaaggtagtttttttaggagtgttttaaaagtttagtttttttaggaatgatggttggaaagattatttgaggatatgtagttttgtttatgttgggttattgatttgtttattttatttgtattgattttttaattgagtgaaataaatggtttgattaatatttttgttttgaattaattatttatttggatatttagtaaatatagggtttttgtgaaataggattaggtaatgttagttttgtattggtagatagatatagattggatgtagagtatattattgtttaggaaaaataaaaagatgattaggtatttattatttgagtttaggaaggaaattagttatttgttttgagagtggatattattaatttgaaatgtttagttatttgtatatttatttaaaattgagtttgaatgtttggtagtaggaagatggaataaatgttttttttatttagttgttttaaaattgtgtggttaaaagatatatttgtttggatgttgttttttttgggattgtttgatttgaattttaaaaattaaaagggtttttagttggatatgattattagttgggtattatgttttgtgtagaggggaggatttgatagtggtttttttttgtattgtaatgaagttttttaggggtggtattgtagagttttagttgtatggggtttgtgaggttggatgtagtgtgtttttttgaggatgggtgattgatgtgagtgagtttagaggtttaggagtaaatgagttagtagtagggagtagaagtaatgaaataggggtatttttttgaatttttgtttattttgggatagtttgatattttttttagagggagtaaataaatagtggagggagatgtgtttatgtaatttatttttaaaataagtgggtgatgttattgaaggaattaatagtttaattaaagaagttaaatagaattgatgtaaatatagttggtttttttttaatgtagatttatattatttttagttttattattaattaattgtgtgaatttggataagtatgttgggttttagtttttttaaatataaaatgagtaggttatttaaggtaatggtttagttattttttagatttaatattttttaattttattatatataaatagtggtagaagtttttttaattgttgtaatgataatagtatttaatattttttgagtattttttatgtgttaagaattatgatagaggttttaaaatatattttattaaaatatatgattttattgttttttttaaataattttatgaggtagagaatattattattttgattttgtatgtggagaatttgaggttataaaagattatggtttttggataa

SEQ ID NO: 2798 - DNA, 2365 bp, Artificial Sequence
  chemically treated genomic DNA (Homo sapiens)
aatgtaattattaatgttatttgttataggtttaaaatattttattatttttaaaaagaaattttgtatttattaaatagttatttgtatttttttttgttttaagtatttggtaatagataatttgttttttgttgttatggatgtatttgaatatatatttttaaataattgaaaataggtatttaaataaatatttgtatatgaatgaagatttaattttaaatgggtaattttgaaaaaaattagtttgtaggttagttaattttagaaagtgagtttataaagaataggttgggtggttataatgtttattgaatttattaaaatttgtttttattttgtattttagtttagattgtttttagtgttaaaagtagaattagaagattataatggtttttagaaataagatgaattaatatgaatggtgagttttgagtgagttaggttataatttttagtaagaaaaatatagaatttaaattttattgtttttagtttttgttttaattgttttataattgggaaattttgtttttaaatgaatattattggtaaataattttttttaattgaaggtttaaaatgtttgggtaaaattaaaaatgattttttatttaaggtttagtaatagttaaggtatttaaataggagtaggttgaagaattgtttttaggtttggttttagtaaatttgtaattatttatttttttatttagatttattttgaataaagtaaagggtaattaaagtgtattaattgtttattgatgatttaagataaataaaaattttataatttttgttttaaatagtgtgtattgagatatatagagagagagagaaaaaaaaaatagttttttttaggtggtgaataattatttatttattagattttttttaagttaagagttttattgtttatgttaggtttttggatattgtatataaaataaattaagttttattaatttagtggaatatttggaaatattaattttataggtgtatgagagaaaattgtagttttaagtattagagtattattaaatataatatattttgtatgtaggggtagttatttaatattaaattaataaaatattattagtgttggtgagagttttggttgttgatagtaggttaggtgttttatagttatgttgtttttttgtttgtaggttaattttatatagttgtttttttttggaaattatgttttatttgaagtttttgtaagtatgataaatagtttttttaagttttagtgatggtggagaaatttgaaaatatttaggagtatttattaattagaatatgaaagaagatttagtttaattgtagtttttgattgtgtggaggttttgttattgtaagaaatgttatttgtttgggtgtgtatattttttgtaggatattgtgtaaaattattattttgagggtaaagttaagtttaaattgtatagaaattttaatgttgatttataagtggataaaattagaattaagtttttatttttaaatttagttgtttggtggtattgttgatttatatgttgttattttatgtattataaatgttagatagagttttttgtatagggagttttaaatttgtgtaggaatttaggatttataggaaaaagatatagaaaaaaagaaagattaggtgttaattgaattgtttaaattaggtttgtaatatgtaaagtatattgagattaaagttaggagaggtggatttagttgttggagtttgggatgaataatggaggaagggaggatataggtaattggtaggggttaaggatggggtggggtggttttgtgtatataatatgatatattttgagaaaaagtgaattaatatggttaaagtggagagtttatgaaaagtttatggaggtaagtagaaggagagaaatgtagatatattgaatggttttattatagaggtttttgaatattaggataggatatagattttttatttaattataggaaatgtggggtgatgagggttttgggaatatgagtgtgatataagaaggaagggtttggggaaattttattataatagttttttagattaattgatatggagagaattgagaaatgtttagtatgtttagaggattgagtaatgagagatttgtatgaggttggaattggtagtgataaaaaggaatggaatgttttaaagaattatttgaaagagagaaatattttgaaggaagtatttataggatttgagaatttattgggtgtagagagtgatgtgtgggtaggtttaggtggattttgggattttgagtttaggttatttaaataataaaataagaaaatttaaagagtaaattga

SEQ ID NO: 2799 - DNA, 2365 bp, Artificial Sequence
  chemically treated genomic DNA (Homo sapiens)
ttagtttattttttgagtttttttattttgttgtttaagtggtttgggtttaaagttttagaatttgtttgaatttgtttatatgttattttttatatttagtgagtttttaggttttataaatattttttttaaaatgttttttttttttaaatgattttttaaaatattttatttttttttattattgttaattttaattttgtgtaggttttttattatttaattttttaagtatattgggtattttttaattttttttatgttaattaatttaagaggttgttgtaatggaatttttttaaattttttttttttatgttatatttatgtttttaaagtttttattattttatattttttgtagttaaataaaagatttatattttattttggtgtttaagagtttttgtaatgggattatttaatgtatttatatttttttttttttatttgtttttatggattttttatgaattttttattttagttatattggtttatttttttttaaaatatgttatgttgtgtgtatagagttattttattttatttttagtttttgttagttgtttatgttttttttttttttattatttattttaaattttaatagttgggtttattttttttgattttagttttagtgtgttttgtatgttgtaagtttggtttgaataatttaattagtatttagtttttttttttttttatattttttttttataaattttaaatttttgtatagatttgaagttttttgtataaggagttttatttgatatttgtgatatgtagaatggtagtatgtggattagtagtattattagatagttgagtttgaaagtaaagatttgattttaattttgtttatttatagattaatgttagaatttttatgtagtttaaatttagttttgtttttagggtgataattttatatagtgttttgtaaaagatatatatgtttaaatagatagtattttttataataataagatttttatatagttaaaagttgtagttgaattaaatttttttttatattttagttaataaatgtttttaaatatttttaagtttttttattgttgttaaggtttagagaggttatttgttatatttgtgaaggttttaaatgaggtatgatttttagaagaaagtagttgtgtaaaattggtttgtaaatagaaagatggtatggttgtgggatatttagtttgttgttaataattaaaatttttattggtattggtaatgttttattggtttaatattaaataattgtttttgtatatggagtgtattatatttaatggtattttaatatttggaattgtagtttttttttatgtatttgtaaaattagtatttttaaatattttattaagttaataaagtttaatttgttttatgtgtggtgtttaaaagtttgatataggtagtggaatttttgatttggagaagatttgatgggtaaatggttatttattatttaagagggattgttttttttttttttttttttttatgtattttaatgtatattatttgaaataaagattataaggtttttgtttattttgagttattagtgagtgattaatgtattttggttattttttgttttgtttagggtaagtttggatggggagatgagtaattgtaggtttgttaagattaaatttgaagatgattttttagtttgtttttgtttgaatgttttaattattattaaattttgggtagggagttatttttagttttgtttagatattttaagtttttaattagaaaggattatttattaatagtatttatttgagggtaaaattttttaattataaaatagttaaaataaaagttgaaaataatgaaatttggattttgtgttttttttattgaaagttatgatttggtttatttagaatttattatttatattaatttattttgtttttagaagttattgtgattttttgattttgtttttggtattaagaatagtttgaattaaggtataaaataaaaataggttttaataaatttaatgggtattgtggttatttagtttgttttttatagatttattttttaagattaattgatttatagattgattttttttaaagttgtttatttaaaattggatttttgtttatatgtaagtatttgtttgaatatttgtttttaattatttgggggtatatatttagatatatttatggtaatagagagtaaattatttgttgttaggtgtttggggtaggggagagtgtaagtgattgtttaataggtatagggtttttttttgggggtgatgaaatgttttgagtttataatagatagtattaatagttgtatt

SEQ ID NO: 2800 - DNA, 2356 bp, Artificial Sequence
  chemically treated genomic DNA (Homo sapiens)
tatgtaatgggaatgtttttatttattgttataaatattataggagttataatttaattttttaatgaattattattttgaaatagtaggtagttgaaaagataatttgtagggatatgaggaagtgtttatgaaattttaaggttatatattttattattattttagaaatagtatgtttgtagtttattttttgtaaatttaagaaaattttataaaatttttatgagattgagtgatttaaaatttttttttttttaggtttatgtaaaatttttataggtgatttaaaaatgtaaattttgatttatgggataagtagaattttttagattttgtagttggtttgagtgttagtatatggtttatagtattaaggtgaaatggagaaaaaagtgtgaaaagataaaagataatttatgtgagttttaggatgaaatttggaaaaaaatttagtttttatttttttaatttaaatagttattaaaagattaatgattatataatatagtattaaaatatttatgtataaatatatatattttttattattttatttatattatgtatgtgatttttgtatataaaatataaaagaatgttagaaatagtaaagttgttaaggttatatagagattgttattttagatgatttaaaaaattttaatgattgtatatatagatttgagagatgtagaggtatatagttgtagttttagaatttagttttatttattatttgtttgttagtattatgaattttggttgagagttgttttgtagatttgagaattttgtttttttttttaagtattttgggttgagttttttaggggattaatggaatttagaagtaatgtttttttgtttttaaatttggggtaaaataagggtaggttattaattttaaggtaggttattaatttagttatgggttttttatatgtttttgtttgtaattgtgtggtagattagatatttagttatttattttttgtaagggaagttatttaatgtagatgtttaaggaattttatgtttaaatatggttattgttgaatttgatgggagaaaaaaaggattgtatttttgttggttaatgtggtatttttggatgtttattaagttgttaaaaaatgtgaaatgatgatttattgtgaagtttttttaatttttttttttgttttaatttgtttgtggtttgaaggaatgtatattgatttgagttaaagaagaaatttgtggtttttattatagtttgtaaatattgattgttgaaagttttaagtgtgttattattttttgttatatatatgttttatatatagtttattttggaaaatagattgggagagtattgtgtttataattttagagtaatttaattaatggggggttggtttgtttgggggttttgagattattattgttaatagtggaggttttttttgatgttttttaagttaaagtattaagagagaagttaaagataagttttattaaagaaagatttttttggtatttatagtggttttttgttgttttattattagtaaaagagatataaaaaaatttttgttttttttttaggttgtatttttaggttttatttttgatgttattgaaaagttggtttatttattatttttaaggttattggtaatgttattatttttgattaatgattagtttatggttaagtagtattttatggttaggtgatggttatattgaaagtttagattttagtattatgtaatatagttatgtaataaaattgtatttgtattttttaaatttatttttaaaaagtttaatttaattatgtaggagtggtagtagaatgtaaattatttagggaattattttggtagtgtttgatggatttaaataatattaagagaaagattgtagagggtattttgagatttgtatgatattttgattagggttgataagaagagttaaatggataagttttttttggaaggagatattatggatgtggtatgggtagaaaaagtataagatgtagtattagaggatttgaatgtgttttttggttttgatatttagtggttttgtgatttagggtattgttttttagatattaatatgggtatatattatttggggggtttgttaaatgtagattttgatttagtaggtgtgggtggggtttaaggttgtttattttggttattttgtatttggttgtgagaaatagagaatttggtaaggtttttaatttatgtaagttttagttttttttttaataatatggggtttagaatgatgttaattttttagggttattgggatttatggtattggtaagagtttttggtataggtat

SEQ ID NO: 2801 - DNA, 2356 bp, Artificial Sequence
  chemically treated genomic DNA (Homo sapiens)
gtgtttgtgttaggaatttttattagtgttatgagttttaataattttggaaggttggtattattttaaattttgtgttattaaagaagaaattgagatttatgtgggttaggagttttgttaggttttttattttttatagttaggtgtaagatgattagggtgggtagttttaggttttatttatatttattgaattagaatttgtatttaataaattttttaggtgatatgtatttatgttaatgtttaagaagtagtgttttaggttataaagttattgaatgttaaagttagaaggtatatttgaattttttgatgttgtattttgtattttttttatttatattatatttatgatatttttttttagaagaaatttatttatttagttttttttattaattttggttaggatgttatgtaaattttaggatattttttgtagttttttttttggtattatttaaatttattaggtattattagaataattttttggatggtttgtattttgttgttatttttgtataattaaattaaattttttaaaaatagatttagggggtataaatgtaattttgttatatggttatattatatagtgttgaaatttgggtttttaatataattattatttaattatggaatattatttagttataaattaattattaattaaaaatgatagtattgttagtggttttggaaataatagataaattaattttttaatgatattaagaataaggtttaaggatataatttaaaagagaagtaaagatttttttatgttttttttgttgatgataaagtagtaaagaattattgtgggtattaggaagatttttttttaatgaggtttgtttttggttttttttttgatattttggtttaaaagatattagaggggatttttattgttaatagtgatggttttgagatttttaggtagattagttttttattagttgggttattttggagttgtaaatatggtgtttttttaatttgttttttaagatgaattgtatataaagtatgtgtgtggtaggagatgatagtatatttgaggtttttagtaattgatgtttatagattataatggaaattataagttttttttttaatttaagttagtatatatttttttaagttgtaggtaaattggagtagggaagggggttgggaaggttttatagtgagttattattttatattttttaatagtttaatgaatatttagaaatgttgtattagttagtaaaaatatagtttttttttttttttattaaatttagtaatgattgtatttggatgtgggattttttgagtatttatattaagtgattttttttatagaaggtaagtgattaaatgtttagtttgttatatagttataagtaaaagtatatgaagagtttataattaagttaataatttgttttgaagttaataatttgtttttgttttgttttaagtttgggagtagggaaatattatttttaggttttattaattttttgaaaaatttagtttagagtgtttggaaaagaagatagaatttttagatttgtagagtagtttttagttaagatttatggtgttaatagatagatggtaaataaagttgggttttaaggttatagttgtgtgtttttgtattttttagatttatgtgtgtgattattaaaattttttagattatttaaaatagtagtttttgtgtaattttggtaattttgttatttttgatatttttttatattttatgtatagaggttatatgtataatgtgggtaaaataatgaaaaatgtgtgtgtttgtgtatggatattttaatgttatattatgtagttattagttttttaatggttgtttgaattaagaaggtagaaattgagtttttttttaagttttgttttgaggtttgtataaattgttttttgtttttttatgtttttttttttattttgttttaatattataggttatatgttagtatttaagttaattataagatttgaaggattttatttgttttatgaattaaaatttgtatttttagattatttgtgagaattttgtatgagtttgaaaggaaagaggttttgaattatttagttttataagaattttgtaagatttttttgaatttataaaaaataaattgtaagtatattatttttggaatgatagtaggatatgtaattttgaaattttatggatatttttttatatttttatagattgtttttttagttatttgttattttaaagtagtaatttattaaaagattgaattataatttttgtaatatttgtgataatggataaaaatatttttgttatata

SEQ ID NO: 2802 - DNA, 2474 bp, Artificial Sequence
  chemically treated genomic DNA (Homo sapiens)
aagtttttttgtaaatatttataattttatataatttattattatttattaggtatattttttaatttatatgttttgaaatttttaaattttgaaatgttagaagtaaatttgggaattatttagttttattatttatttaatgatgaaattttaaattagatatttttttagttgattgattgataagttttttatttttttttaaaaataatgtttttttataagtttttttaaattatttttatttatatttattaaaagtagtaatgaagttaagggttattgttttgggtagatgtttgtggatattagatttttaggaagattaagtttaggaatttagttttggaggtttaaattttttggaagtaattatatttatgtttagtttttttagatttatgagtttaaataaaaatttttttttgaggtattatttttttgtttgtagttattattagtatttttgttatagtaggttattttttttgttgttttttttgttagttttattttttttgaaatatataaaattgtttgggatataaaattttttttttttttagttttgtgatttggattattttttattatatattgaatttttttgtattttttggaagtttgatggtttgttttagaatttagtaaattgggtagagtggattttttaaaggtaagtgagtattgtgagtattatttttttaaggtgaagagtgtttttttatttagagagtattgattttgagaagttatttattgtttttgttaaagtagattttgagtttaggtgttttttagatgtgattttgaagttgagtttttttattttttaagtttgattttggataaattgttggattttttttattttttgttttgtttttttgtgtaatgggaattaggatgttgagtttagtggttgttatgagagtttattgaagtaatgtgaaatatttagtgtagtgtttggtgtttagtaggtattttatagttttgatgtttttggggtaggtttattttagaagttttaagaaattttaaaatgagttttatgatgtttgttgtgtttggatataaaatgagaaatagaaaatttgtttttttattttatgggtggagtgttgtttttttatattttaattttttttaataagaaaagggtgttttgaatgtggtgggaaagggtagattatatggtgggaagttatgtaatataagatatattttattgtatggtgtgtttttgtattatagatgtgtatatagatgtgattattaatagagataattagtttataagttttttttggaaattttttattgtttttagtagaaaagtgatttttagttaaggtttgagttgaagtttagtttatgattaaagtatttttaattgttttatattgaaaagaaagaaaagagaaatgattagtagtggttttttagttaaggtgtgagattagaggttatttaaaaggtttaagtttattaaaataagtatttgttgtggttttttttttttgttttttttttttttttttttttttttttttttttatttttatttttattttttttttttatttatttttttattatatatttttttttttttgtttttttttttttttttttttttttttttttttttttattttttatagaaaaatattattttatgttaaggaaatattgagtaatatttatttattgttgagtttgttaatgtggagagggtatatttgtttattttttaagttgtgtaattttattattattatttttattggtgatatgtgatggaagttttatgtaaatgtttaaagtagtagtttagtataataaatataatttttttaggatttaaggaaaaatttgagtttaattttggtttataatttttaattatgtagtatttttaaatatagtagttttgtggattaaataaaataaatgtatgaatataaggtatttttataatatatatggaattatagtttaagttttattttttataatagaagtagggtttgagaaatagatttaggtgtatgttattttgggtggtaaatattttaggaggaaggggagtgaaggaagtagatggagtaggtggaggagttgagtttaggatgtggttttttttggagtttggatttattttaattttatagagagttttggagtgtgaattatatatatgaagtttgtttttattttgatgtggttggttggttttttgtattttttatgtttattagtttttgtaggtgggttgtttttgggttgggggtggtgaggtaattttttaggtaaatgtttaagaggaaatttttggagaagggggtagttatgagttattagtagtttttgtttgtagtatttggggtagaggtattagtttggtaaagggtgttggttgtgatattagtagtatttattatggggtttaataaatggtagttaaa

SEQ ID NO: 2803 - DNA, 2474 bp, Artificial Sequence
  chemically treated genomic DNA (Homo sapiens)
tttagttattatttattgagttttatagtggatgttgttgatattataattaatgttttttattagattggtatttttgttttaggtgttgtaagtggaggttgttaatggtttataattgtttttttttttagagatttttttttggatatttgtttgggaggttattttgttatttttagtttaggggtagtttatttgtaagggttaatggatatgaagaatataaaagattagttaattatattaaggtaggaataaattttatgtgtgtaatttatattttagagttttttgtgggattagggtaaatttagattttagaagagattatattttaagtttagtttttttatttgttttatttgttttttttattttttttttttttgagatgtttattatttaaaatgatatgtatttgaatttgttttttaggttttatttttattatagagaatgagatttaagttgtagttttatatgtattatagagatattttgtatttatatatttattttatttagtttgtagagttattgtatttgagaatattgtatagttgagaattatgaattagggttgaatttaggtttttttttgaattttaaaaagattgtatttattatattaaattgttgttttagatatttgtataaaatttttattatatattattaataaaaataataataataaagttatataatttagaaagtaaataaatatgttttttttatattaataggtttaatgatgagtagatgttgtttagtgtttttttgatataaggtgatatttttttatgaagaataaaggggaaggagagaggagaaagaagaagaagagagtaggagaaaaaaaatgtatgataaagaaataaatgaaagaagaaagtagggatgaaggtaggaaaaagagggagggaaggaaggagggaaaggtagaaagaaaaggttatagtagatatttgttttaatagatttaagttttttaggtgatttttggttttatattttggttggaaaattattgttggttattttttttttttttttttttagtgtggaatagttggaaatgttttaattatgggttgagttttagtttaggttttggttgaaaattatttttttattaaaaatgatgaggagtttttagggagggtttgtaaattagttatttttgttgatgattatatttgtgtgtatatttgtggtatagaaatatgttatgtaataaagtgtattttgtgttatatgattttttattatgtggtttgtttttttttattatatttaagatgttttttttttattaaaaagaattaaaatatagaggagtaatattttatttatagggtgagaaggtagattttttgttttttattttgtgtttaagtatggtaaatattatagaatttattttgagattttttaaaatttttaaagtaagtttgttttaaaggtattaaggttgtagaatgtttattaggtattagatattgtattgaatattttgtattgttttagtggatttttatggtaattattgaatttggtattttggtttttattgtatagaggggtaaagtaaagagtgaaaaaggtttaatagtttgtttaaaattaggtttaggaaatggagaaatttagttttagagttatatttaaagaatatttgagtttaaggtttgttttagtagaaatagtaagtgattttttagggttagtgttttttgaataagaggatattttttattttgaaaaggtgatatttataatgtttatttgtttttgaaagatttattttgtttaatttgttgaattttagagtaagttattaggtttttaaagaatatgaaaaggtttagtatgtgatagagaatagtttaaattataaggttgaggagaggggggattttatattttaaataattttatgtattttaaaaaaagtaaaattagtagaaaaggtagtaagaaaaatgatttgttataataagagtattaatgatgattataaataaaagggtaatgttttagaagaaggtttttgtttgagtttatgggtttaaagaaattggatatgaatgtggttgtttttaaggaatttagatttttaaagttaaatttttaaatttggtttttttaggaatttgatatttataggtatttgtttagaatagtgatttttgattttattattgtttttagtgaatgtgggtaaagataatttaaaggagtttgtaaagaaatattatttttaaaaaagagtagaaagtttgttaattagttaattaaaaaagtatttgatttgaaattttattattaaatgggtggtagaattaaatgatttttaagtttatttttaatattttaggatttggggattttagaatatataagttagaaaatgtatttgatagatggtaatagattatatggggttataaatatttgtaaaaaaattt

SEQ ID NO: 2804 - DNA, 2412 bp, Artificial Sequence
  chemically treated genomic DNA (Homo sapiens)
agggagttttaagaaggaaatagtggttggtaatttttaaattatggaagtggtttaagtttaaaaaatattttggttgttgtagttatttggtttttagtaagattttttgtaggtgtttgagtggaggaaaagatggaaggtgtagaggatgatattggttttttgtttatatttttttggaagttatttgtatattttaaggattgtttattatgaatatttgtaattttttgtttggggtttttatttatttttattattttatggttgaagagtatttttagtttaagtatagagtaagttaaaatgatagagagtttatgtttttagatagttttgaaataatgataaatagatatttgataattaaatattttaatttattggtttttagttggaataatgttgaagaatgttttatattgttttttagagttttttagagggattaattggtttgataatttttaagaatttgttgttttgtttttttttgatatatttttttatttttttattagtgtttttgggaattatttattaaataaattatttatttttgaatttttgttttagtggttgtttttgggaaattaaaattatatagaagaaaagagttagattagtaagtataaatttagtgagaatagttgaaaaggagtattaggaagagaaatatagttaaaaatggtttattataattaagaaagagtgttaagtttatttgattgagggtggaaggaatataagagatagaggggagagattttataggaatttatatgtagaaatatttttttttttgatgttgttggttaaaatataaaaggagaaaaaagaaaagaaaaaataataaaatttgtattataaaatttaggaaatttttttttagataagataaaggtataaaagttttttttttaaaagtataaaagaagttttgatgtttttggatttttgtgtgtttaggaatttttattatttttagaatttgtttaattattttatgatatatttttttttttttagatgtaaaaattgaggagttagttgttagttgaatattttagtattatttttttagtaattattttaaggaatgtatttgaataaaatgtagttttggtattattttaaaaaatggatgatgatttatgttttttttgtggggataagatggttgtgggtatgagttatgattgtatgttgggaagattttgatgggaattttgtttttgttggttgagttataatttatatggatttgagattgtgtgtggtttttattaatatgtttattttgtttgttaaggtttgagttttatttttttttttttgattaaagttttgtttgtattttatatatatttgatttaaaatttgtgtttggaatttagagtggtttgggaatagtaatttggaaaaatttgattatttgttagttaaaatggaatgatgtgtttttagttgtagttgggaaatgggttatttttttgtaggggagtaaatttaaatgatagataaagttttaatttttttaatatttttgtttttgtggagtaggtttggtataaattaaaattgtttataggttaaggaaggtataaattatagtatagatttgtgttttttttaattgtataaagagtttttatatataatttttttggtgaaaaatttttgttttggagtagatgttttatggaaataatagtgaagtttttaaggggttaaggtgaatgaattgtaagattggtttttgaagttttttaggttaaaattattttttttattgtttttggaattggtttttaaaatgtgttttatagtattgttttttagattttaatatgtatataaattatttggggattttgttaaattgtagattttgttttagtagtttttgtgtggggtttgagatgtatttttgataagtttttaggggatattgatgttgatttatgtttatttttgaattttattttgagtggtgagtaatagagggatatagaaagttggttttgaaagattttttttaatataaagattttttagtttaataagtttaaaaaaatttatatttttgtttttttttttagaattttgtaaattaataaattaaagattttgagaagatttgtattgataaagtttgtagttaatgttgttttttaataatttatggaatttgattttgtgaaaggaaaggataatttgatgtgtgttatttttgggaatatttgtttaggtatttaaatagattgaagggggattttagaaaatgtttgattttttttgtggtgatttttgtaattttttttaggtgagtgttattgtttttttaaataagtaagattttaagtttagtttttaatatttttagtagaataataaattttttattta

SEQ ID NO: 2805 - DNA, 2412 bp, Artificial Sequence
  chemically treated genomic DNA (Homo sapiens)
taggtggaaagtttattattttattggggatattgagagttggatttagaattttgtttatttggagaagtagtaatatttatttgagaaaagttgtaagggttattataaagagagttaaatattttttgaaatttttttttagtttgtttaagtgtttgaataaatatttttaagaatagtgtatattagattattttttttttttataaaattaaattttataggttgttaggagatagtattgattgtagattttattagtgtaaatttttttagagtttttaatttgttaatttgtggaattttagagagaaagataaaaatgtgaatttttttgaatttattagattagagaatttttgtattggagagaattttttaagattaattttttatatttttttgttatttgttatttaaagtaggatttagggataaatatagattggtattagtattttttgggagtttattaaaaatgtattttaagttttatataagaattattgaaataaagtttgtaatttaataaaatttttaggtgatttgtatgtatgttaaaatttgagaagtaatgttgtaaaatatattttgaaaattagttttaaggataatgagagagatggttttaatttggaaaattttaagaattagttttatagtttatttattttggttttttaaaaattttattgttgtttttatggaatatttgttttgggatagggattttttattagaaaaattatatgtgaaagttttttatgtagttgagaaaagtatagatttgtgttatgatttgtattttttttggtttataaataattttgatttgtgttaaatttgttttatgaagatagggatgttggaagagttagaattttgtttattatttgaatttatttttttgtagagaaatagtttattttttagttgtagttgagaatatattattttattttaattgataaataattaaatttttttaaattattatttttaagttattttgggttttaagtatagattttgaattaggtgtgtgtgaaatataaatagggttttagttgggaagaaaaagatgaagtttgagttttaataagtaaaatgaatatgttaataaaagttatgtatagttttaagtttgtgtaagttatggtttaattagtaaaagtaaggtttttattggaatttttttagtgtatagttatgatttatgtttatagttattttgtttttgtaagaaaagtataaattattatttattttttaaaatgatgttaaaattgtattttatttaaatgtattttttaaaataattgttgagaaaataatattagagtatttaattgataattgattttttagtttttatatttggagagaaaaaaatgtgttatggagtggttaaatggattttagagatggtggaaatttttaaatatataaaggtttaagaatattagaattttttttatgtttttgaagaggaaatttttgtgtttttattttatttagaaagaggttttttaagttttataatgtaaattttattattttttttttttttttttttttttttatattttaattaatagtattagaaaaaaaaatatttttgtatatgaatttttataaaattttttttttttgttttttatattttttttatttttagttaaataagtttagtatttttttttgattataataagttatttttgattgtgtttttttttttgatatttttttttagttgtttttattaagtttatatttattggtttaattttttttttttatatgattttggttttttagaagtagttattgaggtaaggatttaagagtgagtaatttgtttggtaggtgatttttagaaatattggtaggggagtagaggagtatgttagagaaagataggatagtaagtttttgaagattattaaattagttgatttttttggggagttttgagagatggtgtgaaatattttttagtattattttaattgaggattagtggattgggatatttagttattaaatatttgtttgttattgttttagagttgtttggggatgtaaattttttgttattttggtttgttttgtgtttaggttaagggtattttttagttataaaataatgaaaataaataaaagttttaagtaaggagttataggtgtttataataagtagtttttggaatatgtgagtgatttttagagggatgtggatagaagattaatattattttttatattttttatttttttttttatttaagtgtttgtaagagattttgttaagagttaaatggttataatagttagaatattttttaaatttaaattgtttttatagtttaaagattattagttattattttttttttgaagtttttt

SEQ ID NO: 2806 - DNA, 2464 bp, Artificial Sequence
  chemically treated genomic DNA (Homo sapiens)
attttttatgattatgtagtgttttatttagaggattttagtgttgttattagagtattttgtatatattaagtgtttaataaatgatggttgaatgtagaataaaattattattgatatttttttttttaatttttaagggtatggtataagttttaataaatattaggtgatttttattgaaaataattttattgtataatttataaagtgtttaagtatttattattttatttagtttttattatagttttataagttaagtagttttatttatattttaaggtgagaaaattatgtttagagaagttagatgatttgtttagggttattaataaataagatattatgaagggaatgaatttaaatttggtgtttttgtattatttattttttgtgtagagttgattggttaaaagtttgttttttatttataagttaaggtgttaggtatatagttttgaatgttgagttttaggtttttaatgagtaatttgtattataattaaatagagttgtttggttattttaggttagtatttatggtatttatatttatgaatttatttttttttttttttataaatttataggttgataatttttttgtgtgaaaatttattgaaatgagattattttatttttgttttttgatttttggtgtgtttttttgtttttgtttaaaatatttggttttgttttgatattaagttttagtgttagttttgtgaagatgtaagatagaagttatatatgtataataatataatttatatttttaaagttataataagtagtaatatttttggagtgaaaaattttggtaaagtaaataatatatgttttggggtttgagatttaggtttgaggtttagttatagtatttttatgttttttttgatttaagttaaattatttagtttgttgagattttagttgtttttttttattttggataatgggtatgatgttgattgtttttttgggtggttttgaggattttgggaggatggatataagtgtaatttaaattttggagttttttataattgtaaggtagtattatttatttaaatataaaaataggttattaagtattattaaagggaaaagtaaatgtttagggattatttttgttgtattgttgttggggaaagaggttttttgtttttttaagagtttttagatatatttttagttatattttaaaagtttttttagttgtgtagtttaggtgtatttggtagtatagttgtgttttgatttttttggtagatgttataatttattgttatttttatgtaggaatgtagggtgaggggtttttatgttggttttgtgatttattgtttgataagttttgagtgttaattttaggtaggtttagtggaggtggaatattatttatttgatagtgtttgtgataaagtgggtaattagatgtatttggaaaagtttggttggaaattggttggtatttatataatattatagttaagttaggttttataaaagttaatggagaaaaatgaagttttttaagatttattttgttttttgaggaagttaggaatataggattttgtagttttatttttttttgtgttttttttatttttttattttattttttttagatagggtaatatatttttattggagatgggagtaaaggaaagtgaattgagagttgaggttttaagtgtttgattttagaggtatgttatttttttagtttttaatttttttttttttttttttttttgttttttttttatatatatatatgtatatatatatatatattttatatttttatagagtatatatattttatatttttttgtttttttgtttttgttttttttttatatatatgtgtgagtatatatatatataattatagtgttaggatttaatttggtattttggtttataatttgttttttattggagtttttggagtttggtgttagtttaagagtatgatttgtttgatatgaattttatagttttttttttatttttttttaattggatagttttagtttgttgatgattaatgagtttggaaggtgagtgatagttattttaagggtttttaaaagtttattttagagattagttaaatttttttgttatattaattgtagtgaagttttttgtttaatagtttatggaaaataattgtttgatttttgttttttttttaaattaagttgttatgagtgtagttttgtttattggttaatagtgtgtatgttttttttattgtttttttttaggtagatgaatattttatttatgagaagtaggaagtttattgtgaggttggtttaatattggattttatttggatgtggaggatttttgaaattggaaagttaggattgatttggaaaatgtgtttatagatagtggaataggaaaatgatttgttttttaaggttagtttttttttttt

SEQ ID NO: 2807 - DNA, 2464 bp, Artificial Sequence
  chemically treated genomic DNA (Homo sapiens)
gaggaggaggaattggttttggggagtgaattatttttttgttttattatttgtaagtatattttttagattagttttgattttttaattttagaaattttttatatttaaatgaggtttagtattggattagttttataatggattttttattttttataggtaaaatgtttgtttgtttgaaaggaagtgatagagagaatatgtatattgttggttaataaatagagttgtgtttatggtagtttggtttggggggggggtgggggttaggtagttattttttatgggttgttaaataggaaattttgttgtagttaatgtagtaggagagtttggttagtttttgaaataaatttttgagagtttttaagataattgttgtttattttttagatttattaattattggtaaattgaagttatttagttaggaggaaatgaagagagggttgtagaatttatgttaaatagattatgtttttgaattggtattaaattttagaaattttagtgagaggtaaattgtaagttaaggtgttaagttaaattttagtattgtgattgtgtgtgtgtgtgtttgtatatgtgtgtgagagagagatagagatagaaagatagagaaatatagagtgtgtatattttatagaagtatagagtgtgtgtgtgtgtgtgtatgtgtgtgtgtgagagagagatagagaggaggggaagagagaggattgaagattaaagaaataatatgtttttgagattaaatatttaagattttaatttttaatttgtttttttttatttttatttttaatgagaatatattattttgtttgggggaaatagagtgaaaaggtgggagagatataaaaagaaataaagttatagagttttgtgtttttgatttttttagagagtaaggtagattttgaaggattttatttttttttattaatttttatgaagtttgatttggttgtaatgttgtgtaaatgttagttagtttttagttaggtttttttaagtgtgtttaattgtttattttattataggtattattaggtaaatggtgttttatttttgttgggtttgtttgaggttgatatttaggatttgttaggtaatggattatagagttggtatgggggttttttgttttgtatttttgtatgggggtgatagtaaattatgatatttgttaggaagattagaatatggttgtgttattggatgtatttaagttatataattaggaaggtttttaggatgtgattagagatgtgtttgaaagtttttaaagggataaagagtttttttttttagtaatagtgtagtagagatgatttttgaatatttatttttttttttgatgatgtttaatgatttatttttatgtttgagtgaataatgttgttttgtagttgtaaagggttttagagtttaagttgtatttatatttatttttttaagatttttagaattatttagagggatagttagtattatgtttattgtttaggatgaaaaaaaataattgagattttagtaggttgagtgatttggtttgggttaaaaagaatatgagagtgttgtggttaggttttaaatttagattttaaattttaaaatatgtgttgtttgttttattaagattttttgttttaaaagtgttattgtttattgtagttttggaagtatggattatattgttgtatatgtatagtttttattttatgtttttataggattgatattgaagtttaatattaaaataaaattaaatgttttaaataagaataagaaagtatattaaaaattaagaggtaaaaatgagataattttattttagtgaatttttatataaaaaaattgttaatttataagtttgtaaagagaaaagggggtaggtttataggtgtaaatattataaatgttgatttaaaatggttaaataattttatttggttataatataaattgtttattggaggtttgaggtttaatatttaagattgtatgtttggtattttgatttgtaaatgagagatagatttttgattagttaattttatataaaaagtggatgatgtaaaggtattaaatttgaatttattttttttatgatgttttatttgttgatgattttgagtaagttatttaatttttttgggtgtaatttttttattttaaaatgtggataaaattatttagtttgtagaattgtagtaaggattaaatgaggtagtggatatttaagtattttgtaaattatatagtaaaattatttttagtagaaattatttggtatttattgaaatttgtgttatgtttttggggattaaaaaagaaagtgttagtaatgattttattttgtatttagttattatttattgagtatttggtatatgtaaggtgttttaataataatattgggattttttaaatagaatattatatgattatggagagt

SEQ ID NO: 2808 - DNA, 2429 bp, Artificial Sequence
  chemically treated genomic DNA (Homo sapiens)
tataaatatttatgtttatgggttgtttatatgtgtatttatatatatatgtatatattattatgatagtttaataggaaagatttttgtatattataaaatttagatttattattaattttagttttatgatattgattagaaaggaaggattagaaataatggttttttttagttttagattgggtgatttttattatttatgtatattttatttgattggtataatatagtggagtatatgagtaggttatgtatataatttttttttttttttttgaaggttaagtatataagaatataagagtgaagttttaaaagattttgtagataaatgattgtaataagatgattattgatatttaggtatgttttaaaaggatagaaatttaatttgttgttttttattgtattgtttttttaatatttatttaattgtttttattattaaatatttataattaattgattgtatgaagaaagtaagaaataagtgaataaaaaatatgtttatattaaatgatatatataaagtataaaataatgattagttagattataaatattttagtttttgtagtttatatagtttttgttgtaattagttaattttattattttagagtaaaaataggtatggataaagtataaataagtgagtgtggttgtattttaataaaatattgtttattaaaatagtttataggttgaatttattttatgggttatgttttgttaagagttgatttaaggtattaagggtagttttttatttttaaaataaataattagtttataggtattttaataatttgtaagattttatgaaaggattggtttagaggaaatataatttatttaaattttttattgataagttattagtatatagatggtgtataggattaagtaggtttttagatttttttttttttttgttattaaattttttttggttttgttgtattttatgagttatttttgtttttagtttaatatgaggaaaatgggtagatggtataagaggatattgaatgtattgaaggtagtttaaatattttatgtattagttattttggatatttagtggagtgaatgtggtatttattaatgtttaatgttggtttgggtaaagtttagatagtttgttggtagtaagaaagttaaaggtaagaaggtttgtgttgattgttgtttgtatttatgaggttgagaaatagtagttatgaattagtttgtttgagattttgttgttattatttgtagtagtaaggaagataatattttaaaaagtttttaggaataaaatgagttttaattattagaggaagaattatagtttgtagttatattgtttagaggtttaatgatgatttattgtaaattagattaattaagaatattttttatattgtagttttgagtggtttagataagattattggttttttttgatttttgggattttaaaataaatgggattttagagatttttggtttagggtttgtggaatgttagaagtatgaggtattttattggagatttggttaatttatttttttatagatgtgtaaattgagttttggtgaggtaaatgatatttagtgatttataattagttggtggtgaggtagaaattgagttagtatttttgattttgggttgatagtttgatttttttattaagataattgttatgtatttaattaatgtagtttgtatattgttttttaaagtgattttattagagaattttttttgtttttttatatggtttagagaagattagagttttttagaatttattttaggaaattttttaatgattatttgatatttttaagtttttttaattttatttatatatgttgtttttaagtttggaaaatgagatttaaagagattaggttgttggtttttgattttgtttgtatattagaagtatttatagattttttaaaaattttaattttaagttatatttagattaataaattataatttttaggggtaggatagagatattatattttttgatgttttttaggtgattttaaagtatagataaattttgggagttattgggatagggtatttttatttttgttatattttatataggaaggtattatttattatggtgaaaatatgatttgaggatattagaagagatggaataatattttttgaaaggatgttttgttattattgtgaatatatattagagtagttttgaagaataaaggaataaatataggtgaaagtgttttagaaaattgaaggatttatataatatattttttttttattttaggaggtatttagatttgagttagttgtgaatgttgttttatttaattatttattaggaagaattattttgaaattagagaattagtaaatttttaaaagtatttaatttttgaaa

SEQ ID NO: 2809 - DNA, 2429 bp, Artificial Sequence
  chemically treated genomic DNA (Homo sapiens)
ttttaaaagttaagtgtttttgaaaatttattgattttttgattttagaataattttttttagtaaatagttagataaaatagtatttatagttagtttaagtttgaatattttttaaaataaaagaagaatatattatataaattttttagttttttagagtatttttatttatatttgtttttttgttttttagaattattttgatgtgtgtttataatggtggtagggtatttttttaagaaatgttattttattttttttaatgtttttaaattatgtttttattataatggatgatgtttttttatgtgagatatagtagaggtagaaatgttttgttttagtggtttttaaaatttgtttgtattttaaaattatttgggaaatgttaaaaaatatgatgtttttgttttgtttttggagattgtgatttattggtttgggtgtggtttggagttggaatttttaaaagatttgtaggtatttttaatatataggtaaggttaggagttaataatttagtttttttggattttattttttagatttgaaaatagtatgtgtgggtggagttgaaagggtttgaaggtgttgggtagttattaaagagttttttgaagtaggttttggagaattttggttttttttgaattatgtgaggaaataaaaggggttttttgatgaaattattttggaaaataatgtgtaaattatattggttgaatatataataattgttttaataaaagaattaaattattaatttagaattaagagtgttggtttaatttttattttattattgattaattatgaattattggatgttatttattttattagagtttagtttatgtatttgtaaagaaatgggttgattagatttttagtgagatgttttatatttttaatattttataagttttgaattagaaatttttgagattttatttattttaggattttaggagttaaagggaattaatgattttatttaagttatttaagattataatatggggggtatttttaattggtttaatttgtaatgaattattattaagtttttaggtaatgtagttgtagattgtgattttttttttagtggttaagatttattttatttttgaaagttttttaaaatattattttttttattgttgtaaataatgatagtagagttttagataggttgatttatagttattgttttttagttttgtaagtatagatgataattgatataggtttttttgtttttagtttttttgttgttagtagattgtttggattttgtttgggttgatattgggtattaatgaatgttgtatttattttattggatatttgaagtgattaatgtatggaatatttgggttgtttttagtatatttaatgtttttttatgttatttatttattttttttgtattaggttggaaataagaataatttataaaatatagtaaggttaaaaggaatttagtggtagggaggagagaaagtttaaaggtttgtttggttttgtatattatttatatattgatgatttgttagtagaaagtttgggtgaattgtgttttttttgagttgatttttttatgaagttttgtaaattattaaaatatttataagttaattatttattttgagaataaagggttgtttttgatgttttaaattagtttttgataaagtatgatttatgggataaatttagtttgtagattattttagtaaataatattttattggaatatagttatatttatttgtttatattttatttatatttgtttttgttttaaaatggtagagttgattagttgtaatagagattgtatgaattgtagaagttaaaatatttatgatttaattgattattgttttatattttatatatgttatttggtatagatatattttttatttatttattttttgttttttttatgtaattaattaattataggtatttaataatgaaagtaattaagtaaatattaaagaaataatataataagaaataataaattaagtttttgtttttttaaaatatatttaaatattgatagttattttattgtaattatttatttataaaattttttagaattttatttttatgtttttatatgtttggtttttagggaaaaaaaagagaattatgtatatgatttgtttatgtgttttattatattatgttaattaaataaaatatatataaatggtaaaaattatttaatttaaagttaaagagaattattatttttggttttttttttttagttaatgttataaaattagagttggtgataaatttaagttttataatatgtaggaattttttttattaagttattataataatatatgtatatatatgtaaatgtatatataaataatttataaatatgaatatttgtg

SEQ ID NO: 2810 - DNA, 2431 bp, Artificial Sequence
  chemically treated genomic DNA (Homo sapiens)
tatagatgagaaatttgagatttggaaagtttatttatttgtttgaaatggataatggtaaagttatgattaaatttttaagttttaagattttgtttaattttttagtgttttggttttataagaagaaagtaattgatttgggattttttatttatatttttttttttttttttttaatgtaaaattatttgattgaatttggtttttaataaagtaatttagagttatttgataatttttgtattgtaattaatattttttttttttttttttttaaattattttaggggaaagaagggagtaagatagagatttaaaaatatatatatgtatagtgttgggtttagtggtttaggtttgtaattttagtattttgggaggttgaggtgggtggattatttgagattaggagttagagattagtttggttaatatggtgaaattttgtttttattgaaaatataaagttaggtgtggtggtatatgtttgtaattttagttatttgggaggttgaggtaggagaattatttgaatttgggaggtagaggttttagtgagttgagattgtattattgtattttagtttgggtaaaaaaatgtgaatttttgttttaaaaaaaaaataagaagagatttagagatagaaagagggtttgggtttgtaattttttgtttttttgtgaagtaaattttttaatttattaaaaatatagtattaggaaatgttgtgtttttaagtgttagtgtgtttttttttgatttttgatttatgtttgtttatttgatgaagttattagtggtttgtagtttgtataggttaggagggttttaatgatttaggatatttttgttggatgttgtggttgaaattatagtatttttggtagtaaagtgaggggtgtgtgtgtgtgtgtgtgtgtgtgtgtgtgtgtgtgtgtgtaggtaggtaggaggagtaatttaaaagagagattttagtatgagggatgattattttttaaaatttattatttaggtttttgtaggtaatattttgaatttaaaatgatttttagttaagttgtgtttgtatttgggaattgtgagaagtattgaaagttttataaaggagaggaaatttgattatgataggaagtgatttatagtttttgaggtttagatgtattgatataaggtagtgaagtaggaaagaattatggtttttaaaaagaagtaggattttggttttttttttattttagtgtgatgtgtgtgttttagaataaaattttttaattatagtgtaaaagtgatatttatgtaataggagtggtttaaattttttgtttttgtgggtttgatatagaggaaagttagaattttttttatgatttgtttattgtgtgttagtgttgtggtttttaagtgttgtgtaaatttgattttttaagttttaggtgggttatgtgggtgatggtagtgtttaaaagtgtggaagaaatgagttaaagttagtaagttatttggagattgaggttgtggttgtttgatttatagtagtatatttttttgtgtgtataaattgttagatatttttattttttagtattttttgttgtttgatttttttttatgaatattttttgttgttttatttgaagtaataagggatttgatatttagtagtaggtgagtatataaaaagttgagtatgaattgtattgttggtgtgtgaattgttttggaagaattatgttattggaaaatttgatatttttttgaaaagatgatgggttttattagtgagatgtttttattttagaggaagttatttttttaatgtaatattttgtttgatatattgttttaagattaattttaggagaattttgagtgtagtaaaagtattttgtattattttttagtaagtgattttataataaataagattattgaattttattttttgagttaggttttataatattaatttttattagtgttttttatatgtagttggggtgaaatgtgtttagtttgttttttttttttagtttatttttttttgttttttttatttaaaatttagtgttagagggatagtttgaaataatttgaagggatggtatatgatgatttttgaggttgtttttttgatttttagatgtttttttgttttgtatgatttgttatttgggggtgagtgggggaagttagtggaataaatatatttttatttgtaaaattgagtattggttttgaattaatatgaagggataaatggaaagtaaggtgaaagtatatgatgtaagagagttgattaatatgaaaatattggtagaaagtgttgtaattttttaagtggtttgtataggagaaaaagttgtttatttttaggtaagattggttaaatattgtgggttaagtttaggttttatgtatatgtgg

SEQ ID NO: 2811 - DNA, 2431 bp, Artificial Sequence
  chemically treated genomic DNA (Homo sapiens)
ttatatgtatgtggggtttgaatttggtttatgatgtttagttaattttatttaaagataaatagtttttttttttgtataagttgtttaagaagttatagtattttttattagtatttttatgttgattaatttttttatattatatatttttattttgttttttatttgtttttttatgttaatttaaagttagtgtttggttttgtagatagaaatatatttattttattggttttttttgtttatttttaaatggtaggttatgtagaatagggaaatatttggggattaagggaatggttttaaaagttattatatgttatttttttaggttgttttaaattgtttttttaatattgggttttggatgaaggagatgaaaagaagtgaattgaaaggggaaaataaattgagtatattttattttagttatatgtgaagaatattggtagaaattagtattatgaggtttggtttaagaggtaaagtttaatggttttatttattatgaaattatttgttgggaaatggtgtagaatgtttttgttatatttaagatttttttgagattgattttgaagtagtatgttaggtaaggtgttgtattaaaaaaatagttttttttggagtggagatattttattggtaaggtttattatttttttaaaagaatattaaattttttagtgatatggtttttttaagatagtttatatattagtaatgtagtttatatttagttttttgtatatttatttgttgttggatattagattttttgttgttttaagtggagtaataagaaatgtttataaagaagaattaagtaataagaaatgttagagaataagaatatttgataatttgtgtatataaagaaatgtattattatgaattgggtagttataattttagtttttaagtaatttgttggttttagtttattttttttgtatttttggatgttgttattatttatatagtttatttggaatttggaaaattaggtttgtatagtatttggaaattataatattgatatatgatgaataagttatagaggaaattttgatttttttttgtattagatttataaaggtaagggatttagattatttttgttgtatgaatgttatttttgtattgtggttagaggattttgttttaggatatatatattatattgggataaaagagaaattaagattttatttttttttgaaaattgtaatttttttttattttattattttatgttaatatatttgagttttaggggttgtaagttattttttgttgtggttaggtttttttttttttatgaagtttttaatattttttatagtttttaggtgtaaatatgatttggttgaaagttattttgaatttagaatattgtttatagaggtttagatggtgggttttgagaaataattattttttatgttaaagttttttttttaagttgttttttttatttatttatatatatatatatatatatatatatatatatatatatatattttttattttgttgttagaaatgttgtggttttagttatagtatttggtgaaggtgttttgggttattggaatttttttgatttgtataggttgtaagttattgataattttattagatgggtagatatgaattaggggttaggaagggatatgttgatatttaaagatataatattttttgatgttgtgtttttggtaagttgaaaagtttattttatagaagaataagaaattgtagatttaggttttttttttgtttttaaatttttttttattttttttttgagatggagatttatatttttttgtttaggttggagtgtaatggtgtgattttggtttattgaaatttttgttttttaggtttaagtgatttttttgttttagttttttaagtagttgggattataagtatgtgttattatatttggttttgtatttttagtagagatggggttttattatgttggttagattggtttttaatttttgattttaggtgatttatttgttttagttttttaaagtgttgggattataggtttgagttattgggtttggtattatatatatatatatttttaaatttttgttttgttttttttttttttttggaatggtttaaaaaaaaaagagagaaggatattaattataatgtaggagttattaagtgattttaaattgttttattaaaaattaagtttagttaggtggttttatattgaaaagaaaaaagaaaaggtatgaatggagaattttaaattagttattttttttttataaggttagggtattgggggattggataaggttttagaatttgggaatttaattatggttttgttattgtttattttaggtaagtaggtaaattttttgggttttaggttttttatttata

SEQ ID NO: 2812 - DNA, 2460 bp, Artificial Sequence
  chemically treated genomic DNA (Homo sapiens)
tttgtaattttagttatttgagaggttgaggtaggaaaattgtttgaatttggggggtagaggttttagtaagttaagattttgttattgtattttagtttgggtgatatagtgagattttgttttaaaaaaaaaaaaaaaatggataatttttattttatttgttttaattttttataagtgttagttagatttttggaggggaaaagaaatgagtggtagaatttagttaataatttagttatttgaatttagaatggtataaggtagtggttttaagagatatttgtgtttttaggagatatttggtaatatttagaggtattttttgttgtattaataggattagggattgaggagggtgttgttattagtatttagtgggaaaagattagaaagattataaaatattttataatgtattatttaatttaaaatgttgaggtaatgataatgttgggaaattttagttttaaagatttatgttaaagtgttaatagtagtttgttttttattttttatatttgtaatttttttataatatttgtgtgttgttttattaaaaaggaaaataataaaagttatttttatttttaagataaagtggttatagtatgttagaagtttagatgtggttaaatgttggtgattgttgataaagaaaataataaatttggtttttattaatagtttttggtattttttggaattttttgtggaatgaaaatagtgattaagaggaagagagattggatttgatagagtttatttatagatatgtattattaaaaaagaaatttagtaaggtaatttgtgtttagagatttagtttagtggattttatgttggttgattttttttttgtttatttaaatggtatgaatttttagttgttgatattattgtatgggtggtgtggggtatgttagggagtatttagttttggttttataggtttattatggttggttagttttaattaaaagattttttttgttttgtttttaggatttttagatatggaattggggttttatttttggttttgggtatttatgttgttttttgttatgttgttagatttatatgtaagttaaggtagttttagaggaatatttttttttttttatttttattttttagtatagttttggatttatagttaattaagtgtattatagaagagttagtaattttgatgtgtaaaatgtttatgttttgttatttttaatatgttggtatttttgatagtttttaattagagtagtatggttaattttagtttgttatttgtgtgggttaagttgtttgaaaaatttttgagggattagttagtggtgggaggatgatttttttataaataaatgatggaattttgatgtttggaagatattagttgtggtttggtttttggggttttttgaggggatagaaatgttagttttttttttttttggttttttgggttgttttatagttgggattgatgttttttattttagtattggaagatttttaggaggtttttggattatagagatatttggttttagttttattttattattgttagtgttaaaggtgtaatatttatttttaagtgattatataaaataatttttttaagggagattttgggtatgaagtttatataaatattttagaatagttagaaaagtttattttgattttagaataatgttttataaggattgagttattaaaattattttttttataagtttattttattgggagaatatttatataaaaatttttaatattggggttgtgggagggaaagtgtgtagataatgtaaaaggattttaattttgaaagaaataaagaaaaaaagaagaggattagtatatttagttttgttttatgtgatttgaaattttatttgattttttagtagattgttattaaaattttgatattagaaagaagtttttatttatttatatataatatgatagtttatgtagaaatttgtaagaaatttataaaaaagtattagaattaatatatgagtttattaaggttatgggatataagattagtatttaaaaattaattatatgtttatatattagtaattaattattggaaattaaaattttaaaaaataatatggtttaaaaattatatagtttggatatggtagtttatatttgtaattttagtatttttagaggtaaaggtaggaagattttttgagtttaggagtttgagatttgattgggtaatatagggagattttgtttttataagaaatttaaatattagttaggtatggtggtatgtatttatagttttagttatttaggaggtagagtttaggaggttgaggttgtagtgagttgtaatggtgtttttgtattttagtttgggtgatagagtaaagttttgttttaaaaaaataaaataaaaataaaaataagatgtaattatgtata

SEQ ID NO: 2813 - DNA, 2460 bp, Artificial Sequence
  chemically treated genomic DNA (Homo sapiens)
tatatataattatattttgtttttgtttttgttttgtttttttgagataggattttgttttgttatttaggttgaagtgtagaggtattattatggtttattgtagttttagttttttgggttttgttttttgagtagttggaattataggtgtatgttattatatttggttaatgtttaaattttttatagagatagggtttttttatgttgtttagttaggttttaaatttttgggtttaagagatttttttgtttttgtttttgaaagtattaggattataggtgtgagttattatgtttagattatgtaatttttaaattgtattattttttaaaattttgatttttagtagttgattgttaatgtatagatatatgattgatttttaaatgttgattttgtattttgtgattttgataaatttatgtattaattttggtgtttttttgtagattttttgtaaatttttatatagattattatgttatatgtgaatggatagagatttttttttaatattaggattttggtaataatttattgagagattagataaaattttagattatgtaaaataaaattggatatgttggtttttttttttttttttttgttttttttggaattaaaatttttttatattatttgtatatttttttttttatgattttaatattaaggatttttgtataaatatttttttagtgaaatggatttatgggaagagtggttttggtgatttagtttttgtgaaatattattttaaaattaaaataaatttttttagttattttgaagtgtttatatgaattttatatttaggattttttttgaagaaattattttatatagttatttggggataaatgttatatttttagtattagtaatgataaaatgaaattggaattagatatttttgtggtttggaggttttttgagggttttttaatgttggaatggagagtattagttttagttgtgagatagtttagagagttaaggaagaagggagttgatatttttgtttttttaaaaggttttaggaattaaattatagttagtattttttagatattgaggttttattatttgtttataggaaaattatttttttattattggttgattttttaaggattttttaaatagtttaatttatataaatgataggttgaagttaattgtattgttttaattgaggattgttaaaaatattagtatgttgggggtggtaggatatgggtgttttgtatgttagagttgttggtttttttatgatatgtttgattggttgtggatttagaattgtattaaggaataagaataaagggagggaaatatttttttagggttgttttagtttatgtatgaatttggtaatataataggaagtagtatagatgtttagagttaaaaataaagttttagttttatgtttggaagttttgaagataagataaagggagttttttaattaggattggttagttataataaatttatggagttagaattagatgttttttggtatgttttatattatttatatagtggtgttagtagttaaaaatttatattatttgagtgaatagaaaaaaagttagttaatgtgaaatttattaggttaggtttttaggtatgggttgttttgttaagttttttttttaataatgtatgtttatgagtagattttattaaatttaattttttttttttttagttattatttttattttatggggggttttaaagagtgttaagggttgttggtaagaattaggtttattattttttttattaatagttattaatatttggttatatttgaatttttgatatgttatggttattttgttttaaaagtaaaagtagtttttattgtttttttttttagtaaagtaatatataaatattgtagaaaaattataaatatagaaaatagaagataagttgttgttaatattttggtatagatttttaaaattagggttttttaatattgttattattttaatattttgggttggatgatgtattgtagggtattttgtagtttttttggtttttttttattagatgttggtaataatattttttttaatttttaattttgttggtataataaaaaatgtttttagatattgttaaatgttttttgggggtgtaaatattttttaaaattattgttttatgttattttgaatttaggtgattgaattgttgattgaattttattatttatttttttttttttttaggagtttaattggtatttatgaggaattgaggtaaatggaataaaaattatttattttttttttttttttgagataaagttttgttatgttgtttaggttggagtgtaatggtgagattttggtttattaaaatttttgttttttggatttaagtgatttttttgttttagttttttgagtagttgggattatagg

SEQ ID NO: 2814 - DNA, 2489 bp, Artificial Sequence
  chemically treated genomic DNA (Homo sapiens)
taaatttggaatagaattttagattatagtggttaaagaaattgattttgtttgtaagtaagttggattaagatttatatgagagttttggggttaagggaaataaagtattgttttaagaaggaagattttgttttgataaaatatttttttataatgtgatttttttaagaaattataaaagagtagttagggatttatttatgtattttaatatttgaagagttttagattgattgtatgtttgatagttataggaattttatttttataagaatttatttataaaaataaaagtatatttattatttttaaatttatatatttgagttttaaaaatatagtttttttttagtttttgttagtatatgttgttaaatttttttatgttgttagatttatttaaaaattaatttttttaatgtatgttatattttatgttgttttggttgtttttgtatattttgaagaaaatagggaagataatggtttttttttttaatttaatatatatatgtgatagagaaatgtaaggatgttgtatttttagaggattaaatttaaaatgataatagatttgattgatttttttaaaaaagaattttattttatgtaatttggataataaggtatatatggttggattaaaaatattgtgtttttaagatttttttttaatttttattttataattataaagaaatgaggttatgtgttgttgtaagaagttttattgtaaatatatgtatgtgtatgtttgtgtgtgatttgtaaatttagttttagaaaggtgtaataataaaatggaattgaatttagttatggtttttatgagtgtgagtaaagtatgtatgtggaaatttaagatgttaatgaaattagtatagattttaatggtattttggtgtttttaaaagattgttattaaataaagtttaatgtgttaaaatggaaattttaagtaagagaaatgtgggaagaagtttaaggaatagaaattgtttggggaagatgatttgaatgttttttaaaatttttgagaagtattaagtttaagtttagttttttatttttgataaatattatattgtgtatttgtttgttattttgtggttttgttgtttttgttagtttgttaaatggaattttggttttagttagatgaaaatgtggtaatttttgtgttttgtttgttttggtgtttgaggagtggttgtgtttgattgtgtgaggttgtttagtgttaagggtaattattggtatttgtattgatagtaagtagtttgtagtaatagattgaaaatgttttttttagatttttagattggaattttagttttatttttaaaagttttatgtttatagtatggttgataaaataaattattaaattaattgttttgggagtttttaagttgtgatattaaggtagttgtgagttattatttttgatgaaggagtagttttagaaattgtgtgtatttgatggaggtttggtaaagtgtgtaagtttgtagatttatggtaaataggttttatttttaagtatttatttttagaaagggaaaaaaagagttgtttatttttaattttggatttattttaaattatttatagggaaatgggtgttttatttaatggtattgtttatttttatagagaaatgtttgtagtgaaaatgtaaaatattattttttttttttgttgaggttttttattttatggtgtttattttatttttttagtagagaatgtagaaaagtattaaaggtagtattatgaaatgtagagttgttaatttttaattttgttagagttttgtttttttttttatttggggagttgaattgagttattagaattttttttttatattttttttagaatataagttttgataaaattaaagggttttatatttttaaagttttagaaattttatagggtatggtgagggtaggggtggggttgaagggatgggaaatttataggttaaaaataaaaatttgggtgaaaaatttaggttttgttagttattattagtgggattttagttagttatttagatatttggttttttgtttatttgtttgtgaaatagaaatgattatatttgttttatgtgtttgttggaaatatataaaataagataattttaggagtaaagtgatttatatttgtaatgttgaaatggataaaaaataaaatagatatgtgagtgtatagatgataaatatgttataaaataaaggtagtaaagtgttagtaattgtaaggagagatgtgggtgtatgtatgtttgttatataatttttttaatttttttgtgtatttgaaagtattttaattaggaggaagtgatttagaagggtaaattttttttatgtaagtataatttttgtattttttgtttttagttaaattttagatgtaggtatatggttatattgaattttagtggagaatggaaaaaaatatattttttttat

SEQ ID NO: 2815 - DNA, 2489 bp, Artificial Sequence
  chemically treated genomic DNA (Homo sapiens)
atgaaaaagatatatttttttttattttttgttgaggtttagtatggttgtgtgtttatatttggaatttaattagaggtagggaatatgggaattatatttatatggaaaagatttgtttttttaaattgtttttttttgattaagatgtttttaaatgtatagaaaagttgagagaattatataataaatatgtatatatttatatttttttttataattgttaatattttgttgtttttgttttatgatatatttattatttatgtatttatatatttattttattttttatttattttaatattgtagatataaattattttgtttttgaagttattttgttttatatgtttttaataagtatatgaggtagatatgattatttttattttataaataagtaagtagagggttagatgtttaagtaattagttgaggttttattgatagtaattggtagagtttggattttttgtttaagtttttgtttttaatttatgaattttttatttttttaattttatttttatttttattgtattttgtagaatttttgaggttttaggggtataaagttttttaattttgttaggatttgtattttagagggagtgtaaaaggaaagttttaatggtttagtttagttttttaaatgggaaggagggtagaattttgatggagttgggaattaatagttttgtgttttatgatgttgtttttggtgtttttttgtattttttgttgggagagtaaagtgggtattataggatgaggagttttagtagagaaaagaaatggtattttgtatttttattgtaaatatttttttgtgagaataaataatgttattaaatggggtatttatttttttgtgagtaatttaaaataagtttgaaattgagaatggatagttttttttttttttttttgaaaataaatgtttagaaatgagatttgtttattataggtttgtagatttatatattttgttaaatttttattagatgtatataatttttgaagttgtttttttattaagaatgatgatttgtagttattttaatgttatagtttggaagtttttaaagtaattggtttagtaatttattttgttaattgtgttgtggatatgaaatttttaaaagtaaagttgaagttttaatttaaagatttgaaaagaatatttttaatttgttgttgtagattgtttgttgttagtgtaggtgttagtagttatttttggtattgggtggttttatatagttgggtatagttgttttttggatgttgaggtaagtaaagtatagagattattatatttttatttgattgaaattagagttttatttaataagttgataggagtaataggattatgaaataataagtagatatatagtgtggtatttgttaaagataaagggttgagtttgagtttaatgttttttgaaggttttggaagatatttaaattattttttttaaatagtttttgttttttgaatttttttttatattttttttatttggggtttttattttgatatattaagttttatttggtggtgattttttgaagatattagaatgttattaaagtttatgttgattttattaatattttaggtttttatatgtatattttatttatgtttgtaagagttatggttaaatttaattttattttattgttatatttttttagagttaaatttataaattatatataaatatgtatatgtatgtgtttgtaataagattttttgtaataatatatagttttatttttttatggttataaagtaagaattagaaagagattttaaaaatataatatttttaatttaattatgtgtgttttattgtttagattatataaagtaggatttttttttaaaaaaattagttgaatttattgttattttaggtttgattttttgggagtgtaatatttttatatttttttgttgtatgtatatgttaaattggaaaaggaaattattattttttttgttttttttagaatgtataaaagtagttaaaataatatgaaatatggtatgtattagaagaattaatttttggatgagtttggtagtatgaaggagtttgatagtatatgttagtaaaagttaaagagaagttatatttttaaaatttagatatatagatttagagatagtagatatatttttatttttatagataaatttttataaaaataaaatttttatagttgttaaatatgtagttagtttgaaattttttaaatattaaaatgtatggatggatttttaattgtttttttatggttttttaggagaattatattgtaagagaatgttttgttaaggtaaagtttttttttttgggataatgttttattttttttagttttaaagtttttatatagattttgatttaatttgtttataagtaaagttagtttttttggttattatgatttagagttttattttaagtttg

SEQ ID NO: 2816 - DNA, 2500 bp, Artificial Sequence
  chemically treated genomic DNA (Homo sapiens)
tagtgatattatttgggtggtaaggttattgatgaggtaaatgttattttattttttgagttataatttttaaattttttgtaataaatatttattatttttataataagaaaaataaataaattttattagaaaaaaattttaaaatataatgtaaggttgtaattttttttttttagattttattgtattaagtatgtataaaaggtttaagaaataatttttggtttttttaaattttgtgtggaaaggatgtgtgtaaatgtataggtgtttttgattgtatttgtgattatggaaagatgttattatattgagtggtttttttaggttgtgtttattttatttgagaagtgattttaggaagtattaatttgagagtagggaaatgagatagatagtggaagaaagttattattgggtaaatggggttttattttattgggatttttgagagaaagagggatatattgtagtgttattttttttgaggagtaaggaagttgggggtatttttttgttgtttttatttgttattggtttaaggatgattttagagtatgttaattatttggtatttttagtttttatgtttaggttgagtatgttttagggatttgagaaattttttatttttttaaaattatatagtatttgttattggaaggtattgggttgatatatggaagtgtgatgagtgttgaggggatatgggttaggtattaataaaatttattgttatagtattttgttttttttgttaagtattattttagtaattttattgatgattttgttttggtggggttgggattgtggtgggaagggagtaggaatggtagggatgtagtaggtttataagggaaattttgtgattgggtttggtgttattttgttttttgttaaatgtttgagtgtttatttaaaaggttgattttgtttgatgattttgggaatatttaaaataaaagatgtgaaatttaggttttaatattaatttagtatggttagaggaattgaagaatgtattatgaaaatatgatattagaatttagagatgtttatttatgagtttggtaaggttttaaaaatttttttatgatgtgtttgagtttttttgtatataaggtaaaattttattaatttggttagtttataaaattttttataaattgttttatgatgtgtttgaaatattttaggttgagttatttgttgataatttgttttttatttttgatattttggttgaggattattttttttaaaatagaattgttaattttttggagatttgtgattattgtgtgttagtaatgttagtttattaggtatataaatatttatttattggtgttaagtaggtagtaatagaattttggattttagttgttggagaagaaataaagatttttagaattagaattataaattgtttattttatggttgaggaaattgaggttgaaggttatttagttaatttgatgtggagttggaatgaaattttattattttgttttatgaagttgtttttgtataaggttgattggtggtttattttggttggttgatgaaggatattggttttataatttagtgatttgttttaagtgttagattagtttttttatagtgggatttgatattttttttgtattggttattgagtggttggtagtaattttattttttatggtttttttgggttttttagttttttagattttaaattggttaggattgtgtattttagaaaatattgattgattatttaagaatattgttaattagttagaatgaattgttatgggattttaatataatattttggagtgttagatatagagagaagatatagttgggagttggtatatttaagttttttggtttggttttttttttattttggtggaggtaattttgaagataaataaattatgtgagtaaattattttatggtgaggttaagtttattagagattaaatgtttagaggggaaaagggaagttgatttttttgatgatttaaaaagaatgttagttgaagttaaagtataatattttagggttatttgttggttggtggaggaaggtatggtttttttatagggtaaggatagataagataggtagataattatagtttgtgtttgggtagtgtatgtgtaaatagggtggagaatttgtaggttattaagttaaggaaataatttttttttgttgttatgtatttattagtaaaattggaataatttttatttttttttattgtttggaaagattaattaggataaaatagaaaaagtatatagagaattattaagaatgtagtgtgtgttgagtagatattatttatgtatttgttatttatttttttatttatttatttatttatttatttatttattttattatttatttatatattttatttttatttatttatatttatttatttatttatttatttatttatttatttatttattatttattattt

SEQ ID NO: 2817 - DNA, 2500 bp, Artificial Sequence
  chemically treated genomic DNA (Homo sapiens)
agatgatagatgatagatagatagatagatagatagatagatagatagatagatatagatagatgaagatgggatgtatagatagatgataggatggatagatagataaatgggtggatagataaagagatagatgatagatatatagataatatttatttagtatatattatatttttggtagttttttatgtgttttttttgttttattttaattaatttttttaagtaataaaaagaaatgaaaattattttaattttattaataaatgtatggtagtagagagaagttatttttttggtttaataatttataagttttttgttttgtttgtatatgtattgtttaagtataagttgtaattatttgtttgttttgtttgtttttgttttgtgggaaagttatgtttttttttattagttagtgggtagttttagaatgttgtattttgattttagttgatgttttttttgaattattaaagaggttaatttttttttttttttttgagtatttaatttttaatgaatttaattttattatagggtggtttgtttatataatttatttatttttagaattgtttttattaggatgggaagaggattaggttagagaatttaagtgtgttagtttttagttatgttttttttttgtatttgatattttaaaatattatattaggattttataataatttgttttagttgattagtaatatttttaggtaattggttagtgttttttgaagtatatagttttgattaatttagaatttaaggaattaaaaggtttagaaaagttataaagggtgaaattattgttaattatttagtggttaatatgaggagagtattaaattttattatggggagattgatttggtatttagaatgaattgttgaattatagaattagtgttttttattagttaattagaatgggttgttaattaattttgtgtagaggtggttttatgggatgagatggtggagttttattttagttttatattaagttggttgggtgatttttggttttaatttttttaattataaaataaataatttgtgattttagttttaaaagtttttgttttttttttagtaattaaggtttagaattttgttgttatttgtttaatattaataaatgaatatttatgtgtttggtagattgatattgttagtatatagtggttataggtttttaagaagttagtaattttattttggggaagataatttttagttgaggtgttaaaaataaaggataaattgttaataaataatttagtttgaggtattttaaatatattataaaatgatttgtgagggattttataggttggttgggttgatggaattttgttttgtatgtagaagaatttaaatgtattataaaaaaatttttaaaattttgttaaatttataaataaatatttttgagttttgatattatgtttttatggtatattttttaatttttttggttatattgggttaatgttgaaatttggattttatattttttgttttgaatatttttagagttattaagtagggttagttttttaaatgaatatttaagtatttgataggagataggataatattaagtttagttataggattttttttatggatttattatatttttattatttttgttttttttttgttatagttttagttttattaggatagaattattagtaagattgttgaggtggtgtttaataagaaaagtagaatgttatggtagtggattttgttggtatttggtttatatttttttaatatttattatgtttttgtgtgttaatttggtgttttttaatggtaagtgttgtgtggttttgggaaggtaaagagttttttaggtttttggagtgtgtttggtttgggtatggaggttggaagtgttaaatagttgatatgttttgggattatttttaaattaatagtagatgggagtggtggagaaatatttttagtttttttgttttttagggagaataatgttgtagtgtgttttttttttttttagaggttttagtaagatgaagttttatttgtttagtagtggtttttttttattgtttgttttatttttttgtttttagattggtgttttttgggattattttttaaataaagtgagtataatttaagaaagttatttaatgtaatgatgtttttttatggttataaatgtagttagagatatttgtgtatttatatatattttttttatataggatttaagggagttaaaaattattttttgagttttttatatatgtttagtgtagtgggatttaaaaaaaggaaattatagttttgtattatattttagggtttttttttagtaaaatttatttattttttttgttgtaaaagtgatagatgtttattgtagaaaatttagaagttatagtttaaaaaataggataatatttattttattaataattttgttatttaggtggtattattg

SEQ ID NO: 2818 - DNA, 2460 bp, Artificial Sequence
  chemically treated genomic DNA (Homo sapiens)
agtattttatataaaagtatttagaggttttttatttgttttgagtatgttttagatgtataaatattatttattttaaattttaaattaaaaggtgtattgtaattgttttaaataaaatattagttaagattgaaatatatataaatttaaagtaatattttttttttttatttatgtgaagggagtttagttaataaattttaggatatatgttggaggaattgtttagtaatatattttaagtaagtaagtatttaataaaggaatttatttttagttttttaaagataaatattataaatttattttatagttaagttgtgaagttagttttttgttgtagatttttttaaatgtttgtttgaataagatggggggtaaaattgattttgaagaagtgaagtttattagtgaaatgtatttagggtgtttatttgggggggtattttgaaaaaatgaagaaaaatatttagttataggtttagttttatataaatttgtttgtagtatgagggttatgaaggttgatgagtggaattttagttttgggagaaaatttttttttgtgagtatttaaattaatatattagaaattatagtatattttagagaatatggtagaaattgtgaaaaatagagtaagatttttttttgtttttaataataataataataagttttaaggattatattaataaagtagattgatttgtttaggaataaaatttttaaataattttgtgaaagataagtattttttattgtagtaaaaataatgagtatgattttttttttttgatgaagattttgtttaatgttttaaaaatattttgtagtgatttttatttttattttttttttttttagttttttttttgaatatggaattagagtgttttttgttgtgaagtatttttgggaaagaggtgttaattttgtattgtttttgagtgtaatatatattttttattttaaatgggagtttataatgatattgtgtggaagggattttaggtttttgtgattattattatgtttttttgagttgtgtttttggaaaaaaatgtgaaggaggtagttttttggaatgaataaattttgttgtttgtttgtaattatttattaaaatagattaaagaaataggttaaaaaggaatttgttatttatgttagagatagtataataagagtatatagaaagggaaaattaatattagggaggaaggaatgttagatatgtgtttttaagaatatggttatgtttgtattgttggtttatatgtagatatatgtttgggttttttatttggtagggtgggttgtgttgatgaaaatgtgggttattaatattgatgtgtatgtttttaattaatattagaattgagtggtaaatataattaggagagtatttaagagagaaatgggttaaaagagaagttaatgtgtagagaggagggggaagagatgggttggagagaagaaattggttagtttttgtttagatgggtttaatttagttatttgagttaaaattggaaatttgttttttagtataattgtttttgtgtttagtgggtgttgtttttgtaggtgttttttattgtaggtgaattttataaatagtatattattattaaattattttgggggttaattttttttatttgtgtttttagtttttatgtaagtatttttatagtgttttttaatatataggatttatttttggttttgagaagagtttttaaatttaattttttattggagtattaatttgtttttttatttttaaattagtatttttggttaatttttattagaaatggtagatttttttagtatggttatttgagaaatataggtttgtgttaattttttgttttgttttgtggttgtttttgtttgtgattgttgggagaataatagggtgggggagattttgatgatggttgttgatattatttttgtatttttgttttttaaagtttaaagtatataattggaaatatttgtggatggttgttttaaaaatatttttaattatatttgtttaaagaaaataaaaattattatttatttttaaaaaaaggaatgttagaatttatttttgtttttttattttggttttttttatgatatttgagtggaataatatgttatgatgtttatgtatgaaaaatagaatatatttgtatatgttatgaggaagaaagttgtttttaggaaaatgaattttttttttttttttttatgttttaggaaatgatttattaaagtaataaaataatttattgggaaagtagtgttatttataaaaataattagtttttgatttttttttatttttataaggttaatgtaataaggatgttgtagaggtaaaaatgaatttgaatttttttaattatatgaatatttatgaattttattgtagtttttatgtaattattttattta

SEQ ID NO: 2819 - DNA, 2460 bp, Artificial Sequence
  chemically treated genomic DNA (Homo sapiens)
taaataaagtggttatataggagttgtaataaaatttataagtgtttatatggttaaaaggatttgagtttatttttgtttttgtaatatttttgttatattagttttataaaaatgaaaggaagttaaaggttgattgtttttataaataatattgtttttttaatgagttattttgttattttgataaattattttttaaaatataaaaaaagaaaaaaaaagtttgtttttttagaagtagtttttttttttataatatatgtaagtgtattttgttttttatatataaatattatagtatattattttatttaaatattatgggaaaagttagaataaaaaagtaaaaataagttttggtatttttttttttaaaaataggtagtagtttttattttttttaggtgaatatgattagaaatatttttaaggtaattgtttataggtatttttagttatgtattttgaattttaagaaatagaaatataagaataatattagtgattattattaaaattttttttattttgttgtttttttagtagttataaataaaaatagttataaaataaaataaaaaattaatataaatttatgttttttgagtggttatattaaagaaatttattgtttttgatgaaagttaattgaaagtattggtttaaggatgaagaaataaattagtattttagtgagggattaagtttaaaagttttttttagaattgaagataaattttgtatattagaagatattataaaagtatttgtgtaagagttaaaggtataagtggaaaaagttgatttttaagatggtttgatgatggtgtgttgtttataaaatttatttgtaatgaaaggtgtttgtaaggatagtatttattaaatatagaagtaattgtattagaaaataggtttttagttttgatttaagtgattaaattaaatttatttgaataagggttgattgattttttttttttaatttgtttttttttttttttttttatatattggttttttttttagtttattttttttttgaatgtttttttagttatgtttattatttaattttaatgttaattagagatatatatattagtattagtaatttatgtttttattagtatagtttattttgttaaatgaaaaatttgagtgtgtgtttgtgtgtaagttaataatgtagatatggttgtatttttgaaagtatatatttaatatttttttttttttggtgttaattttttttttttatgtatttttattatgttatttttaatatgggtggtgggtttttttttagtttatttttttaatttattttaataaataattataggtaggtggtaggatttatttattttagagggttattttttttatatttttttttagaggtgtagtttaaggagatatggtgataattatagaggtttggaattttttttatataatgttattatgagtttttatttaaaatgaaaaatgtatattatatttaaaagtgatataaggttagtgttttttttttaggaatgttttataataagggatattttggttttatatttaggaaaggagttggaggaagaaggaatgaaaataaaaattattataaaatatttttaagatattaaataggatttttattgggaaaaaaagattatatttattgtttttgttataatagggaatatttattttttatagggttgtttgagaattttatttttaaatggattaatttattttgttagtatggtttttggggtttattattattattattaaaagtaaaaagagattttattttgttttttataatttttgttatgttttttaggatgtattataatttttaatatattgatttaaatgtttatagaaaagggtttttttttagggttgaagttttatttattagtttttatgatttttatattataaataggtttgtatagagttgagtttgtagttgaatgtttttttttatttttttaaaatgtttttttagatgagtattttgggtatattttattgatgagttttatttttttaaaattaattttattttttattttatttaagtaaatatttaagagagtttgtaatagaaaattaattttgtagtttagttgtagagtgggtttgtaatatttatttttggaggattgggaatgaatttttttattaagtgtttgtttgtttgaagtgtgttgttaaatagtttttttgatgtgtattttaaaatttgttaattgagttttttttatataaatggaaaaaaaaagtattgttttgaatttatatatattttagttttgattaatgttttatttaaaatagttatagtgtattttttgatttgaagtttaaagtaaataatatttgtatatttgaaatatatttaagataaatgaaaagtttttagatgtttttgtgtgagatgtt

SEQ ID NO: 2820 - DNA, 2463 bp, Artificial Sequence
  chemically treated genomic DNA (Homo sapiens)
ttatgaagtgggtggggaggaaagatagatttaaaaatttattagtatttaattttgttaagattttttttattatatgttagtataataatttatttgaaatgtgtattaattatttttgttgtattttgtgtgtatgttttttatgtagtttttgatttttttgttaataattttgtgttgtatttgttgatttgaaataaattgaatttagtggtatttatttaagaattgaattatatagtttttttaattggtgttttatttaaatgtgagaaagtaatggtttgttatttgtaatatgtttttaataaaataaaattagaattttaatatttttttttattttagggaaaggtttggttatgaaaatattatttttgtatgattttaaaaataaaattttttgaattttttttattgttaatgttgtgaaaattgtttatatagatatatattaattggagagatttatgtaaattagttgggttaggaaggttttttttggaagtggtttttaaaataggtggtaatttgtttttgttgttaatagttatattgtttttttttttttagtttttggattttggattatgtgatttaatatatttttggttggtaaaataggaagtgttaagataggaatatgttaagtatttgaagatattttttattgtatttgttagttttaagtttttgagttgtattgtttgttggttggagggggtagaaatttaattttaggagtttagtgatgtttttttattgatggttttataggtaatagatattgtgggtaatattgtttttaatattgtttatttatgtttttttttggaggatttttgtaagtgattgaatagataggagtagttggaaattttgggttttgttttttaattttagtgtgaaattaattgttttaattgtaaagaatgatttatttttttatttattatatttaatttaaaaatgtaaatgttattagtggattgattattgataagggtgtttttgtgtttggttttaatttttattagtgaggattatgaggatgtagttatattggtattttttaagtgttattgtgatagtatttgttgtataaatgtttagttgttattgtgagttttattatttagtttttttttttgaatgtagattaataagtttagaaattataattgtttttttgttgaatttgtgataggtggaaataatgatattagtgttttgttaatttttttgtttttgtgtttggtattgttttattgagttatttgttatattttgttttgatgaggtgaatttaatttttttgttgtaatgataatggggttattttaatgtttggaaatgattatgtggaagttttattgtgttttgttttggtaagtaaattaaggtattgtgtatgttaggagagtgggttttggttgttaggtaggtagtggagatgttgagttattattaggatttagatgtagaagttggttttattttgagtttttggtggtggttttgtaggagggaagaaggatggggaggggaaaggtgggattattgttgtagaagtatagttattggttaattttttagttgtttgtataaatttgtttttagaagggttttttaggttatttgtgttgtttaaggaggttagggtggttggagtttataaataattgtggtgatattattaatattatttgttggggtttttggtgtgtggattgtggattttttttttaggatattaattgaattaaattatttttatattaggtttgattttttttggttttttgagaataatattgttgtagaataaaaaaatatatataatttggaaaatattaggtgttaatgaggatttggagtaattagattttattattgatgttgatttttaaaattattttagaaaagtagtagtttttattgaagttagatatatataaatttagtaaattttgtattgatatagaatattttatatatttataaagtgtatgtgagtatttgttatatgtatagaatgttaaaattagtaattttgtttttaggtagataattaatagagatgtaagtgtgtatttgataaaatatatgaattagaatgtttatagtagtattttttatgataatgttaaattgtaatttgtttaaatgtttattaatagtagaatgttttaggagttggtttttggtggaatattatatagttattggaatgaatgaattataattgtgtggatggattttataaataggatgttggatgaaagaaattaagtatgatagagtatatatgtaaagaattttaggttgggtatgttgatttatgattgtaattttagtattttgggaggttgaggtaggtagattgtttgaggttgggagtttaagattagtttgattaatatgaagaaattttgtgtttattaaaaatataatatatta

SEQ ID NO: 2821 - DNA, 2463 bp, Artificial Sequence
  chemically treated genomic DNA (Homo sapiens)
taatatattgtatttttagtagatatagggtttttttatgttggttaggttggttttgaatttttgattttaggtaatttgtttgttttagttttttgaagtgttgggattatagttatgagttaatgtgtttaatttggaattttttatatatgtattttattatgtttggttttttttatttaatattttgtttatgagatttatttatatagttgtagtttatttattttgatgattgtatggtattttattaaaaattaatttttaaggtattttattgttgatgggtatttggatgaattatagtttggtattattatgaaggatgttgttatgaatattttagtttatgtgttttgttaaatatatatttgtatttttgttggttatttatttaggaataaaattgttggttttgatattttatgtatgtaataaatatttatatgtattttataaatatgtaaaatattttgtattaatataaaatttgttgggtttatatatgtttggttttagtagagattgttgtttttttgaggtggttttagaaattagtattagtagtgggatttggttgttttagatttttattgatatttagtgttttttaagttatgtgtatttttttgttttgtagtagtgttatttttaaagaattaggaaagattaggtttggtgtaagagtaatttgatttagttaatgttttgaagaggaaatttataatttatatattaaaagttttagtaaatgatgttggtagtgttattatgattgtttataagttttagttattttggtttttttgaataatataggtggtttgggaaatttttttagaggtaaatttgtgtagataattaagagattagttaatggttatgtttttgtagtagtgattttattttttttttttttatttttttttttttttgtaaggttattattaaaggtttaaaatgaagttgatttttatgtttaaattttaataataatttagtatttttattgtttgtttgatagttagagtttgtttttttggtgtgtatagtgttttggtttgtttgttaagatagagtatggtgaagtttttatataattatttttaaatattaaaatggttttattgttattatagtagggagattgaatttgttttattaaagtggagtgtgataggtgatttaataggatagtgttaagtgtagaggtaagaagattagtagggtattgatattattatttttgtttattatagatttggtagggaggtaattgtaatttttgggtttattagtttatatttggagggaaaaattgagtgataaaatttatggtgatagttaggtatttgtgtagtaagtgttgttatggtgatatttagaaaatgttaatgtggttatgtttttataatttttattaatagaggttaaagttgggtataaaggtatttttattagtgattagtttattaataatatttgtatttttaagttaaatatagtaagtaaaggagtaagttgttttttgtagttgggataattaattttatattggaattagagagtaaagtttaaaatttttagttgtttttatttgtttgattgtttgtaagaattttttgaggaaagatatgagtgaatggtgttaagaataatgttatttgtagtatttattgtttgtgaagttgttaataggagaatattattaaatttttgaaattagatttttgttttttttaattaatagataatgtggtttaaggatttaaaattaataaatgtagtggaaaatatttttagatgtttaatatatttttgttttaatgttttttattttgttagttggaggtatattaaattatataatttgaaatttaagagttggggagggaaaggtagtataattgttggtaatggagatagattgttgtttattttaagggttatttttaggaaaagtttttttagtttagttgatttgtataaatttttttaattaatatgtgtttatataggtagtttttatggtattggtaatgaaaaaaatttagagaattttatttttgagattatataagaatgatatttttatggttaaatttttttttagaatggggaaaaatattagaattttaattttattttgttggaaatgtattataggtggtaagttgttatttttttatatttaaataagatattaattaagaagattatgtaatttaatttttgagtgagtgttattgaatttaatttgttttaggttaatgaatgtaatgtaaagttattaatgaaaaggttaggggttgtgtagaaagtgtatatataggatataataggggtaattagtatatattttaaatgggttgttgtgttggtatatggtggagaaaattttaataggattagatgttaataaatttttaagtttgttttttttttttatttattttatga

SEQ ID NO: 2822 - DNA, 2499 bp, Artificial Sequence
  chemically treated genomic DNA (Homo sapiens)
gttgtagattgagattttttgtttatttggagggtgaatttggggtgttgaagggtattggggtgtttagggttttttatgtttttttttagtgttatttttgggattttattttgttagagtttttgatattttatgagaaagttggaaatttaggttttttttttttttaattagaaatgttaggatttaaaaatataagtagttaattaaaaatttaaaaatttttaattattgtgtaagttaaatgaaataggtataataaatatgagttgttatgtttttaggtgtttggttagttgggatataggtgaggggttgatggtaggtgtaggtgatttttttgtttattgtttgtttattttatgtgttgttgtttggatttattaatattgtttgttttatatttttgtttgaagaaagttttgttatgtgggtgagttttgtttatattgagagtagggttgagttgtagttagttataaagtttatttttagtgggatattataagggtttatatgaattgaattaataatatttttatatttgaggttatataattttaaaggaaatgtgatttttatagagagaatgaagatgtttttagtatttttaaatatattgagtgttttttaataagtgtattttttttattttgtgtattttgtgtatgaaagttttttgtgaggttatgtttatgaaaataaatgttttttttttttttttttataaaagtggaataatgaaagataaggttaaggttatattatggttatagtggttgttaataagttttttgagattgtttttttttgttgaaattagttaatgaattggagttttttattgagtttatagaaggtagttttttagatttgggagtagataattagagagatattttttttatgtagtatgttgaagggtattatttggttttgtggttatattagttgagtttggtttaggattaattttgttaattattataggtggatttttggtttaaggaagtaaataaggttttggggtatttttttatggttgttttgggattttttagaagtgataagttgttaatttggaagttgtttgggtgataatgatttttgaatgggtttttatgtggatgagtaatatgatttaaggtattagggatattagaaaggatattttttatgtagtttgaaatgtgagtagagagtaaaatagattttaaaagatgagtattgttgtttttttgatattataaagtgttttttgagtgataatagtgtatttttgtgtatgaattgtatttaagttttgtatttttggaaaataataatttgtgttttttggttattatagatttagtatgggtttagaggttttatgtgtgtaggattttatttgtgtaatttttttagtgattgggagaggtaggagtggtttttgtttttattttataggggaggagatggagatttttaagttagtgaaggatttagttgggattttttagttgaagtttgtggattttaaagtttgtgtttgttgaggattaagagatgatagaatttgtagtggtttggatgtggtaggaatttattttatttatttttttttaagatatgggtggtgggagttgttaggttgatagagtatttgatgggaagttaaaagaaatttagtttggttagtagtgtgtttggaattattttgtagggtttattttaaattatggggattgttgtagatttattatttatgtaaaaaaaaaaagttttttagtgatgttatgggagggttattgtggattattgtttgattaattatggttgagtagggagagttgttgttattttttttttttttttgtttttgtgaagttttttatttttttattttagttagatgtttttattaattttatttttttttagttttttgggaaatttattatatttgttttttttttatttttgaatagtttttttttgttaattggattttttttatttttttttttattaatgttgtaaaagttgaaagaattgtatagagaaaattatgtatttattatttagatgttataattggtatttgttgtatgtgttggattatatatttggttttttgtttatttttttaattgtttattaagattttaaaaaaatgtattttaaagtaggttgtagatattatatatttgttttttatatattttagtttgtatattattgattagattttaagatttatttttgttgttttttttgttaagtaaaaatttatagtgaaatgtataatttttatatgtagtattgggtaagttttttttattagtttttaatatatttgttaattttttttattaaaaaattaagttaaatttgtttttattttaggtttatttagttattgttttgaattgtttttttttatttttaattagattttttgaaagtattgtatttgttttttttttttagtttttttttgtatttatttggttt

SEQ ID NO: 2823 - DNA, 2499 bp, Artificial Sequence
  chemically treated genomic DNA (Homo sapiens)
gggttagatgggtgtagggagaggttggagagaagaaatgggtgtagtgtttttgaaaagtttgattggaaatgaggaggagtaatttggggtagtagttgaatgggtttgaggtgagggtagatttggtttggttttttaataggagagattagtagatgtattaaaagttaatggggaaaatttgtttaatgttatatgtgagaattatgtattttattgtaaatttttatttaatagaaaaagtaataaaaatgaattttgaaatttggttagtggtatgtaggttgaagtgtgtaggaagtgagtatataatgtttgtaatttgttttgaaatgtatttttttaaagttttggtgggtggttagaagaatggatagaagattagatgtgtgatttagtatatatagtaaatgttagttgtggtatttgggtggtaagtgtgtgattttttttgtataatttttttaatttttgtaatattggtgaaaaagaaaataagaagagtttagttgatagaaaaagattatttaaaagtaaaaagaaaatagatgtggtaagttttttaaggagttgggaggagatggggttgatgaagatatttggttgagataggaaggtgaggaattttatagaaataagagaaaaaggaaaatgatagtaattttttttatttagttgtgattaattaagtagtaatttataatggtttttttatggtattattgagaggttttttttttttatatagataatgaatttgtaataatttttatgatttaaggtaaattttataaggtgattttaaatatattattaattaggttaaattttttttaattttttgttagatgttttattagtttgatgatttttattatttatgttttgagaaaagataagtgaaatgagtttttgttatatttaagttattgtaagttttattattttttgatttttaataagtataagttttgggatttatagattttagttagagagttttagttggattttttattagtttagggatttttgtttttttttttgtaaaatgggggtaagaattatttttgttttttttaattattgaaagggttatatgaatgaggttttgtatatataaaatttttaggtttatattgggtttatagtaattagaaaatatagattgttattttttaaaaatataaagtttaagtgtaatttatgtataaggatgtattgttgttatttagaagatattttataatgttgagagagtggtggtgtttgttttttgaaatttgttttgttttttatttatattttaagttgtataaaaagtgttttttttggtatttttggtgttttaggttatgttgtttgtttatataaaagtttatttgagaattattattatttaagtagtttttagattggtggtttattatttttgaagggttttaaggtggttatggagaagtgttttaaagttttgtttgtttttttgggttaaaggtttatttgtggtaattagtgagattggttttggattagatttagttggtgtagttataagattaaatgatgttttttaatatgttgtatggaaaaagtgtttttttgattatttgtttttagatttgaaaagttattttttgtgagtttagtggaaaattttaatttattaattgattttaatagaaaaagataattttaaaaggtttgttgataattattgtagttatggtgtaattttaattttattttttattattttgtttttatgaggaaaagaaaaaaaggtgtttgtttttatggatataattttatagaaagtttttatatataagatgtataagatgaaaaaaatatatttattggagaatgtttgatatatttgaaagtgttaggaatatttttattttttttgtagaagttatattttttttaggattgtgtagttttagatataaaaatgttgttaatttaatttatgtgaatttttataatattttattgaaggtagattttataattgattgtagtttaattttgtttttaatatagataagatttatttatgtagtagaattttttttaaatagaaatatgaggtagataatgttaatgggtttaagtaataatatatggaatggataggtagtgggtaagggggttatttgtatttgttgttagttttttatttgtattttagttgattaggtatttaggaatatagtagtttatgtttattatgtttattttatttggtttgtataatggttagggatttttgaatttttagttagttgtttatatttttaaattttgatatttttgattaaaaaaaaaaaaaatttggatttttagtttttttatgaaatattaggaattttgataaaatggagttttagaggtagtattaagggaagatataggaagttttagatattttagtgttttttagtattttaaatttattttttaaataaatagaaaattttagtttgtaat

SEQ ID NO: 2824 - DNA, 2323 bp, Artificial Sequence
  chemically treated genomic DNA (Homo sapiens)
tgagaatttatgttttttaaaggttttaggtgattttgtataaggggtttttgttatattagttggatgttttgaggttttttggagtagaatgaggtgttaaggtgttgtgtttaaatgtatggtttggttaagtgttttagtgtagtgatttttagagggttagatgtagtgaaagtgaaaatgagtatgtgggttatttagatattttaagtttattattttgtttgggttagggtgtatgatgtttatttttgtaaaatagagtgagtaggtagggttgttttttttttttgtagttgggaagttttagttagtttgttttattgaatttttagtttttggagttggtttatttttttttagagaaaatagttttattataaatatataaatttgagttggggtgggggttataggtttttgtttaagtttattttgtaaaattgatttttttgttaatgagaatatagttttgtttttattttttttgtgtgttttggtagtttttgtttggttgtaaaatttatttaaggaaaattggtatttattttgggtttatttgtatttagtaaaattgataaatagatgggggttggttaggttatgggtaatttggttagtattttataaaatataaatgttattttttatttttatagggattatttattgtgaattaggaagttattggtttgttatattttaataggattatttattttagttaagggatttatgtttttattataaagtggtggggggtgttttgggtggaagagattttttggtattgttggtaataaaggaataaaatggttttgttgggtttgtgtatgtatatatagggtatttatttgtgaagattgtgaaaaaagaaagaagtaaagaaagaaattaataagatttgatggggaagtttgtaaaggagattagaatttagattaaatgttttattttagtgtttttggagtttttttttttttgtgttttagttaaaggtattgggaggattagagattttattttagttttgtttattttgggaataattgttggtgtatgaataataatgtttttttttgattatgattaattgaattgtagtttgtgggtagtggggaggggttttgttgggttagtttattatggtgttttttaagtagttattgatagtgatggatgtagtggtgttttttagagtgtatttttgaatatttaagagtaggggtatgaatttgtattttgagtttttattagttggggtttggtagagaggatgggaatggtggtagttaaagatgagttggttgattaaaaggaagaggagaggtagttttttttttaattttttttttttatatttgattttaagtaagttttgtttatggggataaatgagaaaatatttattgtgtgattatgtaggttttagtggggttatttttgttgaggttgtgtttgttaaaagtattgggtttgtttggggtgtagtgggaattttggtttggaaaataaaaaaggtaaaatagttaaagatttgttttgttagaggatgtttagaagttaataaatgaggtagaagaggagatagaaagataagagagaagtaggggtagttggaaatggagtttatggttatgtttataatttaataatggattatatagggattttaatatttggttgttttgttgtttgtgttgtgtttatatagtagaattatgtagttggggttttgggtttagttggattttgtttttatagtatgaaggtgatttttggtgaattgtgatttgggaagtttgtgtagtttagtagtttttatggtggtttggatataggggaagttgtttaattatagggttattgttttttattttagttggatttagtttgggttaaattttagattggtatttttttatgagagttgtgtatgttattttggttttttttggtggtagaggttggttgaaattttaggtggattttggaggtagatgttggttttaagggagttttggttggtttgttttttttggaaagttttgataaaagtatttggggtaggggttatattttttttgtatttaaaattttgaaattttaaatttttttaaatagttttttataatttttttgttagtttattatgttttaaaaattatttataggttttagtattaatagttattttattgtatagaagttttttagttttttttttttatttaagaatgagatattttttgtttattttgaattttataggaataatttagggtgttttgtttttataaataaaaaatttttaaaaaat

SEQ ID NO: 2825 - DNA, 2323 bp, Artificial Sequence
  chemically treated genomic DNA (Homo sapiens)
attttttaaaaattttttatttataagaataagatattttgagttatttttgtaaagtttagaatgggtagagagtattttatttttaaataagagaagggagttgagaaatttttgtgtagtaaaatgattgttggtattaagatttatggataatttttaaagtatagtaagttaataaaaaagttataagaaattgtttggagggatttaaaattttaggattttagatataagagaagtatagtttttgttttgaatgtttttattagggttttttaagaggagtaggttaattaaagtttttttaaagttagtatttgtttttaaaatttgtttggagttttagttagtttttgttattaaaaggagttagggtggtgtgtatagtttttataaaaaggtgttaatttggggtttggtttggattaaatttgattgagatagaaagtagtgattttgtaattggatgattttttttgtgtttagattattatagagattgttgggttgtataagttttttggattgtagtttattaggggttatttttatgttgtgagaataaagtttgattgagtttagggttttagttgtatggttttgttgtgtaaatatagtgtagataataggatgattaaatgttagggtttttgtgtgatttattgttggattatagatatggttatagattttgtttttaattgtttttattttttttttgtttttttgtttttttttttattttatttgttggtttttaaatattttttaataggataaatttttggttgttttgttttttttgttttttaagttagggtttttattgtattttaaataagtttagtatttttaataggtatggttttagtagaggtggttttattgaggtttgtatggttatatgatgaatatttttttatttgtttttatgaataaaatttgtttaaaattaggtgtgggaggaggaggttaggaaaagggttgtttttttttttttttttaattaattaatttatttttaattgttgttatttttgttttttttgttaggttttggttaatagaaatttggaatgtaggtttatatttttgtttttaggtgtttgaggatgtattttgggaagtgttgttgtatttattattgttggtggttatttgagaaatgttgtgatggattggtttggtaaagtttttttttattgtttgtaggttgtaatttaattagttatggttagagggaggtattattatttatatattaatgattgtttttaaagtaaatagagttgggatgaggtttttgatttttttagtgtttttagttgggatataaaagaaaaaaaattttagagatattggggtgggatatttgatttgaattttgattttttttgtaagtttttttattaaattttgttgatttttttttttgtttttttttttttttatagtttttatagataagtgttttgtgtgtgtatatgtaaatttagtagggttattttatttttttattgttaataatgttagaaagttttttttatttaggatattttttattattttataatagggatatggattttttaattggagtgaatgattttgttagaatataatagattaataattttttaatttataataaataatttttgtaaaaataaaggatgatatttgtattttgtaaagtgttaattaaattgtttgtggtttggttagtttttatttgtttattagttttgttgagtataagtgaatttaagataaatgttagttttttttggataaattttatagttaagtagaaattgttaaagtatataggagaggtaaaagtagagttgtgtttttattgatagaaaagttaattttgtaggatggatttaggtaagagtttgtgatttttgttttaatttaagtttgtatgtttataatagggttgttttttttgggagggaatgagttaattttgggagttgaaagtttaatggagtaggttggttggggttttttagttgtagggggaagaaatagttttgtttgtttattttgttttgtaggagtgagtgttatgtattttggtttagatagggtgataaatttggggtgtttggataatttatatgtttatttttatttttgttgtatttgattttttgaggattattgtattgggatatttgattaagttatgtgtttagatataatattttagtattttattttgttttggagagttttagagtgtttagttgatatgatggaaattttttgtgtagagttatttagagtttttaagaaatatgaattttta

SEQ ID NO: 2826 - DNA, 2466 bp, Artificial Sequence
  chemically treated genomic DNA (Homo sapiens)
gtttgaaataaataaataaataaataaataaagggtttttatgtatgatgtttgtgttttaagtaatttgggtaagagtgatattattgtttgtttattagtatttgtaaagaaaaattaattattgttagttttttttaaaaaaatgtatttgttaaaattgtttgatgatatggaaatttatattgaggtgtttatatttaggggtaattaagttttttttgtagttggggtttataattatattttttttattttataaaaattaaaagtttaggaattatgaggaaggagtaagaataaatattattataaattttaaattaatagtgttgagagattatagtagttttattttgttatttggggttagagattgtttatatttattttgtggttagtgtttattggaaagtaatgtagtatatattatggttgtgtttgagttgatatttattaatattgaattaattgtattttaatttaaagattttgtaagtgtttttttttttaattgggaatttggtagaatgttatatttaaatattaaatgttgttaattatgttagtggtattttagtttggataaaatgttttttttattgtagttaattgtttgaatatttgtagattgatatattttttgtagatatttatgttgttttttttttataattttattttattttttttttatttttggtgttgatttaaagggtttttattattttatgttgataatttgtgttttatggttgttggtgtgattgggagtagttgaagttgtgtgtaataatatatatatataaatatttgaataggaaaaagaaggtttgtttgatgtagattaaggaagaaatgtatttaaataaataatgttattagagggattttgattttgaattatgaataggtagggttagatttggaagggtatttttttattgtttggtttgtatgggtgggtgttagtgttatggtttattttaaaaagtaggtttttttaggttttatggtatagggagttgagttgggtttatgttagtaggtttatgatgttattgttgtagtttgtttatttggttaggattattaaaataattttttttgagaagaataaatttgtttttgtagaaagttaaagatttgagaggttttaattagtttattttgtttttgtttttggttgttaaatgttattgtagagtttaaagaatatgatgttgtgtgttttttttttttatttttgtgtgggggttttttttttttttttagtattttttgtgaatagttgaaaatgagtggtaaaatgatatttgatttagaaagtaagagtattaggaagtaaaattggaggtaaatatagtagttaattttattaggtatagttggtgttgtttgtggttgtttttgatagtgtggttgatatagaattatttgtgtttgtttattagttttttttaatttgtgagaaaatggtttgggttggttatatggtagttagataggttaggtattatgggaatataaaagttggagtttttagtagagttaattattaatgtgttttttttttgttttatttaggagtgttgatagggttttgatagtttgtatttgttattagttggttgtagttttagttaggtattaatgagatttttggttttaggttttttggtagagtttagagtttagtttggatttaggtgttgttattaatttgaagtttgtttgttttttgagtttttttttgttgtttgttgtgtttttattttttaggttttgttttggttgattatttatttgtttggaattttgtatgtttttgtaaagtatttgtttgagtttagtgaagtaaggttaggaaatgtgtgattataaagtttataattttttttttttttgtgttattttttttttagttaggaaaaaaaaaaaaaaaattagaaagttaagttgaattttttttttgtttgtttggatgtgtattaaggatggattgttttgttttaatattagtggggtgttttttttttaaaatttagtttagagagttatttatgggtatattttaatatttttatttagtaagtaaaatgtaggtgtttttgatagtaatttttttaaatagaaaattttattttaatatttttaatggtaagtagtttgtgtgttaatatgattggagttagggtgaatgagaattatattaaaattttttagttattagtttttttttttttttttttttttttttgtgatggagttttgttttgttgtttaggttggagtgtagtggtgtgattttggtttattgtaatttttgttttttgggtttaagtaatttttttgttttagttttttgagtagttgggattgtaggtgtatgttattatttttggttaatttttgtattattagtagagatggggttttattatattggttaggttggttttgaat

SEQ ID NO: 2827 - DNA, 2466 bp, Artificial Sequence
  chemically treated genomic DNA (Homo sapiens)
gtttaagattagtttggttaatgtggtgaaattttatttttattaataatataaaaattagttaggagtggtggtatgtgtttgtagttttagttatttaggaggttgaggtaggagaattgtttgaatttaggaggtggaggttgtagtgagttgagattgtattattgtattttagtttgggtgatagagtaagattttattataaaagaaaaaagaaaaaaaaaaaagaattggtagttggaaggttttaatgtggtttttatttattttagttttagttatgttgatatataagttatttattattaaggatgttaaggtgaggttttttatttaaaaaaattgttgttagggatatttgtattttatttgttgagtggaaatattagaatatatttgtgggtgattttttaagttaagttttggaaagaaaatattttattgatgttagggtaaaataatttatttttggtatatatttaaataaataaaaaaaaaatttagtttagttttttaatttttttttttttttttttagttgggggaaggatgatataggggaagagaggattatgggttttataattatatattttttagttttgttttgttgaatttaggtagatgttttgtagaaatgtgtaggattttaggtaggtgggtgattaattagaataaggtttaaggagtgggggtatagtgggtagtaggagggagtttagggggtaggtaggttttaggttgatggtagtatttgggtttaggttgggttttgggttttgttagggagtttggagttaggggttttattagtatttggttaggattgtagttggttgatggtaaatataggttattaaagttttgttagtatttttgaatgggataaagaaaaggtgtattaatgattaattttgttaaaagttttggtttttgtatttttatggtgtttggtttatttggttgttatgtgattggtttgggttatttttttgtagattggggaaagttagtgagtaaatataggtggttttgtgttggttgtgttgttagggataattgtggatagtattagttatgtttggtgaaattagttgttgtgtttgtttttagttttgttttttggtgtttttattttttaagttgaatgttattttgttatttatttttaattatttataggaggtgttaaaaagggggaaaaggtttttatgtaaaaatgggaaagggagatatataatattatgttttttgaattttgtaataatgtttggtgattaaaggtgagggtagggtaaattaattaaaattttttaggtttttaattttttgtaagagtaaatttattttttttaaagggaattattttagtgattttgattaaataagtaagttataataatgatgttataagtttgttggtatggatttagtttggttttttgtgttatggggtttggaagaatttgttttttaaaatgggttgtggtattagtgtttatttgtataagttgggtaatgagagggtgtttttttaagtttgattttgtttatttgtggtttagagttaaggtttttttagtggtattatttgtttaaatgtattttttttttggtttatattagatagatttttttttttttgtttaaatatttatatgtgtgtattattgtatgtggttttaattgtttttaattatattagtggttataaagtatagattattagtatgaggtgataaaggttttttgagttaatattagaaatgaagagaaaatgaaataaagttataaaaagaggatagtataaatgtttataaagagtatattagtttgtagatatttaagtaattagttataataggaaagatattttatttaaattaaagtattgttgatatgattaataatgtttgatatttaaatataatattttgttagatttttagttaagaaagagggtatttgtgaagtttttggattggaatgtagttagtttagtgttagtgaatattagtttaaatatagttgtggtgtgtgttgtgttgttttttaatggatgttgattatagaataaatgtgagtagtttttagttttaaatggtagggtgaggttgttgtaattttttagtgttgttggtttgaggtttgtagtggtgtttatttttgttttttttttgtggtttttaaatttttgatttttgtgaaatgaaggaaatatggttataggttttagttgtaggggagatttggttgtttttgggtataagtattttagtgtggatttttatgttattaagtaattttagtagatatatttttttgaagggggttgatagtaattggtttttttttgtaagtgttgataggtaggtagtggtgttatttttgtttgaattatttagagtataagtattatatataaaaattttttatttatttgtttatttatttattttaaat

SEQ ID NO: 2828 - DNA, 2473 bp, Artificial Sequence
  chemically treated genomic DNA (Homo sapiens)
tttagtttataattagtttttagtttatggtggtttttttttattttttaaatgttaaagtttttagttttttattttttttttatttttgattttaagtttttaaattgggtgattattaatattattgttaggagtatttttagagtattttatatttatagtgtttttttttttttaaattgtttttggttttttttttggaataggtattaaaaatattttattggataaatttttttttttagaagatatattatgaatatggttggagaaggtaggattataatttggagaatttagggttgattttttttatttttttgtttttttgttgtaaagtttggagttttaggaagtgttgttaaattattttttattttttttttaagagtagggtagaataaattgttattttgtttggttttgttttttatatataaggttttttaggttttggaatttaggttattggtattttaattaatgttaatgattgggatgattttttttttattgaatttgagtaagggaaataaataggtaaatttgaataaagttatgtgtggatgtggtattttttagaaaagttgatttttttgatggttggttagggtttttaattaggtttatattttttttttatatatttttaattttgaatttttttagtttaaatagaaattggttgtagggggaagtaggtagatttttttttttaatatataaatgattttgggtttttggaattagaatttttatttttttattattaggagtatttttattttgagattaatataattagaatgtgtttaattataattttataataatagaaaagatatatagtaaatgtttttaaatatttggaatttggttttgaaattgatttggtatttaaattgatatgtatattttagttgggttaaaatatagttaaggttttttttagagatattttgttttatttttttttttaagtaaatttttatttttttttttaatttttatagtttaagtgttttatttagtttaaatgttagggatttaaattgttattttagtggaagaggtttgattaaaatttgtgtttttattaaattattggatagtggtttttgggttttgtttatattagtgttaattttaatttaaattttgtataattatatttgttttgttaaatgtatttattaggaatatattataaattattttgtattatgagttgagtttttttgtttattgtaaagtgttttgaaattagtattataagtaattagttgtaagtgttattttatttttttaatgttttattaattaaattttatggtagttgatgtgatgtttaagtttttaatatataagattagtattatttattttttgtatttgattatggtttttaaatttgatttgttatttgtgtatttgtttttgttggagttttgttttttttttagtggttttttaatatgtggggttttgtatggatattagttgtatgtgtattttttgtagaaattggaaataaaaatttattttttatgttgtggaaatgtatagttttaaagttaggaaatttttttaatggaagaagagttttatttatttttttgagttatttatagtgattttttatgatttttagattaatgttaaaatgttataatggaaaaatttttttgggtaagtttttttttatgttaagaattagagaaaggaattatgtttatttaggtagattataatttttattttggttttagttttttaaaaaattagatatatttagtttaagtatttaattaggaaaaaaaaatgtattttttttttattatgtgatatgaattattttgtattaaatataaaattttagaatttatgtttgtaaagaaatatagaataatttatatttaataattttattatatgtatatataaaattatagtaaaatatgatatattttataggatttttttgtttttttatgatgttattgaatatttgtaaatgtttaaatggaattttttttttattttttatataagtttaaaaatataaatatatatgtatatatatatatttatatatatgtatttttttaattaaaggtaatatttattggtgttaaaattaatagttttattggataatggttttatggatattttagaggtagttttaagtttgttgtgggtataggtatgttggatatgatttttttgtagggatgtttttttggtggttgtgggggatgtttgtggttttttgtttgttagtgttgagtttagttttatagtgagttgagatgaataggtgtttttttttttggtggtggtggtatgtgaggttggttttttgtagaatagtgttttagtgggagatttttagttttatggtttttttttttgattatttagtaggaaaaatatatgaaagtgtttttttttgttagttttgttgatg

SEQ ID NO: 2829 - DNA, 2473 bp, Artificial Sequence
  chemically treated genomic DNA (Homo sapiens)
tattgataaaattggtagaaaaaaatgtttttgtatattttttttgttgggtggttagaaggaaaggttgtgaagttaaaggttttttattgagatgttgttttgtaaggagttgattttatgtgttgttgttgttagagaagagagtatttgtttattttggtttattgtgaggttgagtttagtgttggtaggtgaggggttgtaagtattttttatagttattgagagggtatttttgtagggaaattatatttgatatgtttgtgtttatagtagatttaagattgtttttaaaatgtttatgaagttattgtttagtagagttgttagttttaatattagtgagtattatttttggttaaaaggatgtatgtgtataggtgtatgtgtgtgtgtgtgtgtttgtgtttttggatttgtgtggagaatgaagaaagggttttatttaggtatttgtaaatatttgatggtattatgaaaagataaaaaaattttataaaatatattatattttgttatgattttgtgtgtatatgtaataaaattattaagtataaattgttttgtatttttttgtaagtataaattttaaaattttgtatttagtatagaataatttgtattatataataagggaaaaatatattttttttttttgattaagtgtttagattaaatgtatttggttttttggggaattgaggttaagatggaaattgtagtttgtttgggtgaatgtaatttttttttttaatttttgatatagagaaaaatttgtttagggaaatttttttattatggtattttagtattaatttgaaaattatggggaattattgtggataatttaggggaataagtggaattttttttttattaaaagaattttttgattttgaggttatgtatttttataatatgggaaatgggtttttatttttaatttttgtaaagagtatatatgtaattggtatttatataaagttttatgtgttgggaggttattgagggaggagtagagttttagtgagggtaaatgtataaataataaattaagtttaaagattgtggttaaatgtaaggagtaaatgatattgattttatatgttaggggtttggatattatattagttgttatggagtttgattaatgaggtattaaggagatggagtgatatttatagttagttatttatggtgttaattttaaaatattttgtaatagataaagagatttggtttataatgtaaagtaatttgtggtgtgtttttggtgaatgtatttagtgaagtaaatatagttatgtggaatttaaattaaggttgatattaatgtaaatagagtttaagaattattgtttaataatttgatgaggatataggttttaattaagttttttttattaaaatagtaatttaaatttttaatgtttaaattggataaaatgtttaagttgtaaaggttggggggaaaaatagaaatttatttgaaaaggaaaatgaaatagagtatttttgggggaaattttgattatgttttgatttaattgggatatatatgttgatttaaatgttaggttgattttaaggttagattttaggtatttgaaggtatttgttatgtattttttttgttgttgtaaagttatggttggatatattttggttgtattgattttagagtaaaaatgtttttagtaataagaaagtggggattttgattttgaggatttagaattatttatgtattaaaggaggaaatttatttgtttttttttgtaattaatttttatttgaattaaaaaaatttaaaattgggggtatatgaggaaggagtatgggtttggttagagattttggttagttattggagaggttagtttttttagagggtattatatttgtatatggttttgtttgggtttgtttgtttattttttttatttagatttaatggggaggaggttattttagttattaatattaattaaaatgttagtagtttaggttttagggtttgggaggttttgtatatgagaaataaaattaaataaaatagtaatttattttgttttgtttttggagggaaaataaggggtagtttggtggtattttttggggttttggattttatagtaaaagagtaggaaggtaagggaaattaattttgaattttttgaattatgattttgttttttttaattatatttatgatgtattttttaaggaaaggaatttgtttaatgaggtgtttttaatatttattttgaagaaaggattgagaataatttgggaaggaaaaaatgttgtaaatgtaaagtgttttgaaaatgtttttagtagtaatattaatggttatttaatttaaggatttagagttaggaatggaagggaaatgggaagttggagattttgatatttgggggatgaaggggggttattatgaattgagaattgattatgaattagg

SEQ ID NO: 2830 - DNA, 2437 bp, Artificial Sequence
  chemically treated genomic DNA (Homo sapiens)
ttgggaaggttggggaggtagagttggttttttagtagtttggggtttttttgggtggtttttgtgtaagttaaatatgttaagaaagtttggttgtaggattagtgtttgattagatgtttttgttttttattggttggtgttgttatatatatatatatatatatatatatatatatatatatatttttgatgttgtgagatttggtagttataggtttattgggtatttttttttggagaattgtttgaggttggtagaattatttggttttaaaatgtttggaggtttagttttttttatttatttttagttgatttgatgggttttttgttgtgttttttttttaaggtaggatttgttgtggataatttattttttatatttttgtttggttttttttatttttttatttagttttgtttatttttttttttttaataatatataagtattaaatttttgttttaggatttgtttttaggagattatttaagttaagtggttatttggtttagttaatttttaagattggtatttatatggttgtaatatgtagaattgtatatttaaaagggtgaattttattgttttttaattatattttaataaatttgtttttagaaataagatgaattttatggaaaaatagttattgttattttggagaaaatatttaaatatgttaattaatgaaaaattttagaaaagtaaaaagggaggtagggaaaagttattttgtatttaaaatatttttttggtttattggtttgtagttgttataggtggaggataagataaggggtgggtttttttagggtgttttaggtgttgattgagtagttagtatgtgataaaattttttttttgagagaaaaggaggaagtataagatagggaagggaagtgtagttttaggaaaggggtgggtggaggggttatggtttttgttgtgttatttaaatgtgtgttgtagggatttttgagggttgtgtttttatttgtttggttgttttgtgtttatagggttagtatgtgattatttgggatttggtgtgggtttttttttggttgttttattttttatttattagttgtgtgttaatagaaagttttttgattgaaggatttgtttgggatttttgtaataaaaatagaaggatttgttataaatgttggaaggattttttgtaaaagtggtattttttatgtgattatgagttttagaatatattgttattttgggttgtaagtttggtttttttattgagtggtagtgatagatgttttttgttaatgtttagtgattgaatgttattgtagaggtttgtttttatttatataatttgtttttttttttttgtagttattgtgttatgtttgttataaaatttatattttttgtatattgttggttttttttagtagtgagtttttgtgttaattttgttttgttttttttttggtttatttttgaggatattgggggataaatagtattattattgttaagtgataataaaggttggtaggaatatatttttagtttggggtggttataaggaaggaaagaaataaagaaaaaagtttatgaagttgttggagttatagtttttttttgggaatttagtttaagaatataatttattagaaataaaaagttttatttagatggagatttattgaagtatttgttattataataaaatattgagaataatttgaaaatttttttataggtaaataaatgatgataaatttttttgattggttatggtaggatttttaataattatggggtattggttaaatgtggtaaattgagtagtagtttttgtttttattgtttttttaagtattattaaaataaaagtaaaagggaaaagtatataaatgtatagagataaagaaaatgggaggggagaaaaaggtaaaggaaatagtagataaggaaggttaataaagatggaaagagtgtgaatagaaaaggtttaagtttttgaggaggggatattattaaaatgtgggttattgtgtgttatagaaatttagaaaggtttaggaattggattttttaagtattagggaaagtaggatgaggttggagttaagagggaaagtttgtaggggaaataagtagatgtttagaagatattgttagggttttagtggttttagaattatttttttttagttgttgggaagtgggagtgttttttttggagaaatgatttagatatatttttaaggtggagatatttagtagtgggggtaggattaaggtattagatagaaaggagtgattatgatagaaaaatgtgagattatttaggtttaggttattagtttggtgtttaatgatttgtaggaaaatttataggttagtaagtgtttttattatatttatgtgtatatttttatatgtatttatatagat

SEQ ID NO: 2831 - DNA, 2437 bp, Artificial Sequence
  chemically treated genomic DNA (Homo sapiens)
gtttgtatgagtgtatgtgaggatgtgtatgtgagtgtggtgggggtatttgttgatttgtgggtttttttgtaggttattaggtattaggttagtgatttaggtttgagtgattttatatttttttgttataattatttttttttgtttggtgttttagttttgtttttattgttggatgtttttattttggaaatgtatttaagttatttttttagagaagatatttttattttttgatggttgggggaggatggttttggggttattggagttttgatagtgttttttaggtatttgtttgttttttttgtagatttttttttttagttttagttttattttgttttttttggtatttggggagtttaatttttgagtttttttgggtttttgtggtatatgatgatttatattttagtggtgttttttttttaggaatttgggttttttttgtttatgttttttttatttttgttgattttttttgtttattgttttttttgtttttttttttttttttgttttttttgtttttgtgtatttgtatattttttttttttgtttttattttggtagtatttggggaagtaatgaaaataaaaattgttgtttaatttgttatgtttaattagtgttttataattattaagggttttgttgtaattaattaagagaatttattattatttatttatttgtaaaaggatttttaagttgtttttagtgttttgttatgatagtaagtgttttaataaatttttatttaaatagagttttttatttttgataaattgtatttttgggttgaatttttaggaggagattatgattttagtaattttatgagtttttttttttatttttttttttttttgtagttgttttaagttgaggatgtgtttttgttagtttttattattatttagtagtgatggtattatttgttttttagtgtttttggggatgggttgaggagggagtagggtagggttggtataagggtttattgttggagaaggttaataatgtgtagaaaatgtggattttgtgataagtgtgatatagtggttgtagaaagaaaggaataggttgtgtgggtgaggatgggtttttgtagtgatatttaattattggatattaataggggatatttgttattgttatttagtgaggaggttaggtttgtagtttgggatgataatatgttttggggtttatgattatgtgaaaaatattatttttgtagagggtttttttagtgtttgtgataaatttttttatttttattatagaaattttgggtaaattttttagttaggggattttttattaatatgtagttggtaagtgaaaaataaaataattaagagaaaatttatattagattttaaataattatatgttggttttgtgagtatagggtagttaggtagatgagagtatagtttttagaggtttttgtgatatgtgtttgaatggtatagtagagattatagtttttttgtttattttttttttggagttgtgttttttttttttgttttgtgtttttttttttttttttaagaaggagattttattatatattggttgtttagttagtatttggggtattttggaaagatttattttttgttttgttttttatttgtggtagttgtaagttggtgggttaggagaatattttaaatgtaggatagtttttttttgtttttttttttgtttttttgaggttttttattggttaatatgtttggatattttttttaaaatagtagtaattatttttttatgaagtttattttgtttttaagggtaggtttattgaggtataattgaaaagtaataaagtttatttttttaaatgtatagttttatgtgttatagttatataaatgttagttttggaggttgattaagttaaatgattatttggtttaggtggttttttggaagtagattttaaggtagggatttggtgtttgtgtgttattgaggagaagggagtgagtaaagttggataggagagtggaaggaattgagtaaggatgtgagggatgaattgtttatagtaagttttgttttgaggaaggggtatagtggaggatttattgggttagttgagggtgagtggaggaagttgggtttttaggtattttggagttaggtggttttgttagttttgggtagttttttagggaaggatgtttagtgagtttgtagttgttaagttttatagtattaggggtgtgtgtgtgtgtgtgtgtgtgtgtgtgtgtgtgtgtgtggtagtattagttagtaaaaggtaaaggtatttggttaggtattgattttataattaaatttttttagtatatttaatttgtataaaaattatttgaggaaattttaggttgttaggaagttagttttgtttttttagtttttttag

SEQ ID NO: 2832 - DNA, 2215 bp, Artificial Sequence
  chemically treated genomic DNA (Homo sapiens)
aggggtttagattggtaggttttagttttttgtttattgttttggggtttttttggaaaataggatgggaggtgaaaggtggatataggtttggatttttatattttttgaaataatttaggggtatagtatagaatttttaggagggagggtttggggatagtttttattttgtggatgagaaaattgaggggttttatttttattaaaagggagagagtttgaagttttatattttttatgtgtttatttatagttttttgttgggtttgggggatggaaaaatgatattttagaatggaaataaaatggtttattgtggtttttatttttgaatgtttattatgtgttaagtgtagaagtgttataattttgtaggttaagtttatattttgtatttattttgtataggagtatattgaattataaggtaataatttattttttaaaggatattattttaaatattattgtattttaagtagtatgttgtgtgattttgagtaagttgtttattttttttgggttaggttttagtttagttttgggatatagtagtgattaaaggagttgtggtttttgtttttttagagtttatagtttgggtagggaggaggaggtaaggaatggtaaatatataagaaaataaagattatttttgatggtaatgaatttagtgaataagagtaggagaatgtaaaagaaagtagtttagggggatttgagaaggtttttggggaggtgatatttgatttgagatttgaagaatgaggagtttggtaaagatttggggttgattagtgttttaggaataagtaatagtaagggtaagggttttgaggtaggatagagttattaatagtttaaggagggaggtttttgggttggtgagagaaagggaaggggtttagttgggtagtgggtaggggaggagtttggattttattttttgtgagatgtgttggttttggtggtagtgggggggtttgtagttttttgttataagggttgggggtgtggggatagttagagttaaaggttttttttttatagttttggtagttttagtttagaggtgttggtttggtggttggaagattgtattgtgggtatatttggggagtagttgttgagttagggttagagtgggttatgtggtatagggtaggattgttttggagtttataaggttaagatttttaggaggggtagtggagaatattttggatgagaatagtgtgttaatgaggaggaattgtgtattgtagatgtttaggtatatggttttttgtagttttatatagtttttgttttaggatagagtgtttgggtttaatgttattttttagttttgtgatttgaaataagttatttaatttttttgggttttatggttttagttgtgaaggggatatgatattattattatagttttataggttgttttttttttttttttttttttttttttttttttaattttttgagatgtagttttattttgttgtttaggttggaatgtagtggtattattttagtttattgtaatttttgttttttgggtttgagtgatttttttgttttagtttttttagtagttgtagtagttgggattataggtttttgttattaggtttggttaatttttttatatttttagtggagatggggttttattatgttggttaggttggttttaaatttttgattttaggtgaattatttattttagttttttaaagtgtttttaggttgtttatttttaatttaataaatatttgttgagtattttttatatgttaggtgttgtatgaggttttgtgtgatagtagggaataggatttttgtggtttttttttttttaagtatataattaatgttttagaattaggtttggtattgaggaaatttttagtaaatgtaagttatttgtttggagttttggaggttagaggaggtattttggaaggtagagaaggaggtgtggtgatagaaaaattttaaggaaagtgtatttttttttattattaggtgttgtagttggtttttggtatggtttattttatttttataattattttatgaagagggatgagtattagttttaatttatggatgaggaaattgaggtttagtttgttaatggtatagttaggattggaggtagtgaagggttggtttttttttttttttggggtttaatatttttatttgt

SEQ ID NO: 2833 - DNA, 2215 bp, Artificial Sequence
  chemically treated genomic DNA (Homo sapiens)
atagatgggaatattgagttttagagagaaaaagggattagttttttattgtttttagttttggttgtgttattgataaattgggttttagtttttttatttataaattggagttaatgtttatttttttttgtagggtggttgtgagagtgaaatgagttatattaggagttaattgtagtatttggtgataaaagggagtgtattttttttaggatttttttgttattatatttttttttttgttttttagggtgttttttttggtttttagagttttaggtaaatggtttatatttattaagagtttttttaatgttaggtttggttttaaagtattaattgtgtgtttagaagggaagggattatggaggttttgttttttgttgttatgtagagttttatgtagtatttggtatgtgggaagtgtttaatgaatatttgttgaattagaaataaatagtttgggagtattttgggaggttgaggtgggtggtttatttgaggttaagagtttgagattagtttggttaatatggtgaaattttatttttattaaaaatatgaaaaaattagttaggtttggtggtgggagtttgtagttttagttattatagttattagggaggttgaggtaggagaattgtttgaatttgggaggtagaggttgtagtgagttgagatggtgttattgtattttagtttgggtaatagagtgagattgtgttttaaaaaattaaaaaaaaaaaaaaaaaaaaaaaaaaaaaaagaatagtttgtggaattgtggtagtaatattatgttttttttatagttgaggttatgagatttagagaggttgagtgatttgttttagattataaagttgggaggtggtattgaatttaggtattttgttttgaggtaggggttgtgtggggttgtagggggttgtgtgtttggatgtttatagtgtatagtttttttttgttgatgtattgtttttgtttagagtgttttttattgttttttttaggagttttggttttgtaggttttaggatggttttgttttgtgttatgtgatttattttggttttggtttggtagttgttttttagatgtgtttatagtgtaattttttagttgttaggttggtgtttttgggttgggattgttggagttgtgggggagagatttttggttttggttgtttttatatttttaatttttgtaataggagattataggtttttttattattattagaattagtatattttatggagaataagatttaaattttttttttgtttattatttaattgggtttttttttttttttttattagtttagaggtttttttttttaaattattaatagttttgttttgttttagggtttttgtttttgttgttatttgtttttagaatattgattagttttaggtttttgttagattttttattttttaagttttaggttaaatgttgtttttttagaggtttttttagatttttttaggttatttttttttatatttttttgtttttatttattgaatttattattattagaaatgatttttgtttttttgtgtatttgttattttttgtttttttttttttgtttaggttatgggttttaagagagtaggaattatggtttttttggttattgttgtgttttagagttgaattagggtttggtttagagaaggtaagtaatttgtttaaggttatatagtgtattatttgaaatatagtaatgtttagagtagtgttttttgaagaataaattgttgttttatggtttagtgtatttttgtgtaaaatgggtataaaatatgaatttaatttgtagagttatgatatttttgtatttagtatatggtaagtatttagaaatggaaattataatagattgttttgtttttattttggggtgttatttttttattttttaaatttggtaggaggttgtgggtgggtatataaagggtgtggggttttaggtttttttttttttaataggaatgaaattttttagtttttttatttataaaatggggattgtttttaggtttttttttttaaggattttgtgttgtgtttttgggttgttttagggagtgtgggggtttaggtttgtgtttattttttattttttattttgttttttagagaggttttagaataatggatgggaggttggagtttattagtttgggttttt

SEQ ID NO: 2834 - DNA, 2431 bp, Artificial Sequence
  chemically treated genomic DNA (Homo sapiens)
tatattagatttattgagttaggtatgttgagggtggggtttagtaatgtatattttaataagtattttaggggatagtgatgtgtgtttaagtgtgaggattattgtgttaggagagggatttgtaaattttgatagataataggttttttaatgtaggtatttatgggttaaggagttagtagttatttttttgtgattttagtgtttagttagttaagagtttgttttagggtgagaatattttttttttttttatagttttttgaggggttatttttgtatagtttgattgagttagatatgggagagttgttgagtttgttgagtggatgttttatttttttagttaagattttatttttagaatgaagatggagggaagaatgtttttttatatgtttttttaataagttatatgatagatgaggaaattgaggtttagagtttaagttatttatttaaagttatgttgttaataaatggtagagttagaatttggatttatgtttatttgttttttagtgttttttttattgtagtaatttgtattttttgattagagttagttttaggaggatagggtttggttttttttggatttgagttggagtttttattgaatttttgattttgttgtgggaatttttagttaagttttttagatattgggaggtaggttttttttttgtttttattttgttagtatagtgggtattttggattatgttggattttgttagggatgtggtagttgttagttagttaagttataagttttagtaggtttgaatgatagttaaggtggttattgtgttaagtggattgtagttaggaggtgttttgtttagtttattttttattttttatttggaggttttttattattttaggtagggttttttttttttagtagttgtttagagtttgttatgtattttttggtttttatggtagtttagtttagtaaatggatttgaagttttataaatagtgtaatggtaggttgggaagttgttttgtgtaagaggatagaatatgtattttttgttttttgagttattttttgggattgggtgatgggagtgatttttagtgtagataaagttgaattatttttattttttaggtttatattttatatttggttttgtttttattgtttggtatgtttgtggtttttttttattgtttttgtttttatgtgatggtgtttttaagtttgtttttgggatgttttttgtttttggaatagttgtattagtttggggtatttttttgttatttgattttatagggaggtgtttagtggttgtgggtaatttttagatgattttgtttgtttgatgttattagattgttatttttggttttgttgtttatgttgtagaagttgggttggaatgggagaggaggaatgaaggaggggttgtttttggttttttattgttttagggttttattaagtaggtgtatttatttttttatatttatagagtatttattgaatgttaggttttagggtaattaaattgattttttatttatttatgaatttattttttaatgggtattgttttgtggtatggagtagtaattaaatgtgagggttttggagtaagagagtttggatttaaattttagtttgttatttattatttttgaaatttttttgtgttttagtttttttttggaaatgggagtgattatagtatttattttataaggttgttttgaagattaaaagagttaatatttttgtttgatatattgtaaatatataatgaatgttagtggttattattattaattataatagtattatgtattgtattaggtatttgggatatgaaattgaatgtgatgtagtttgtatttgttttgtattggtatttggattttaagggttttagatattgggatggggtatttagttaatattgttagaaagaatatttgttgtgtgtattattttttttattttatgttggagggtatttaagggaaatagaaattgaagtttttggttgggtgtagtggtttatgtttataattttagtattttgggattatagggaggttaaggtgggtggattgtttgaggttaggagtttgagagtagtttggttaaaatggtgaaattttgtttttattaaaaatgtaaaaaattagttgagtatggtagtgtataattgtaattttagttatttaggaggttgaggtagaagaattatttgaatttaggaggtggaggttgtagtgagtagagattgtatgattgtattttagtttgggtaaaagagtaagattttggtttaaaaaaaaaaaaaaaaaaagaaatatataaaaaagaaaatgaagtttttgttttaggaaagttttagattagtggttttttattttgttatatattagaattttttggagagat

SEQ ID NO: 2835 - DNA, 2431 bp, Artificial Sequence
  chemically treated genomic DNA (Homo sapiens)
atttttttaaaagattttgatgtgtggtagggtgaagagttattgatttaaggtttttttaggataggaattttatttttttttttgtatgtttttttttttttttttttttttgagttggagttttgtttttttatttaggttggagtatagttgtgtaatttttgtttattgtaatttttattttttgggtttaagtgatttttttgttttagttttttgagtagttgggattatagttgtatattattatgtttagttaattttttgtatttttagtagaaatagggttttattattttggttaggttgtttttaaatttttgattttaagtaatttatttattttggtttttttataattttaaagtgttaggattataggtgtgagttattgtgtttagttagaaattttaatttttgttttttttgaatgttttttaatataaggtaggaaaaatagtatatatagtaggtattttttttgatggtgttgattgggtattttattttaatatttgagatttttggagtttagatgttagtgtaaaatagatgtagattatattatatttaattttatattttaagtatttagtataatatgtggtgttgttgtggttagtagtaatagttattaatgtttattgtgtatttataatgtgttagatagagatattaatttttttaatttttagagtaattttatgaggtagatattataattatttttatttttaaaaggaaattgaggtatagaggagttttagaggtagtaaatggtgggttggaatttaaatttaaatttttttgttttagagtttttatatttaattattattttgtattataaagtaatgtttattgaaaaataaatttataagtgagtgaagaattagtttggttgttttagggtttgatatttagtaggtgttttgtaaatgtggaagaataaatgtatttatttggtaggattttggaataatgggaaattaagagtagttttttttttatttttttttttttattttagtttaatttttgtagtataaatagtaaagttaaaaatagtgatttaatgatgttagatgaataaggttatttgaaaattgtttatagttattggatatttttttataggattaagtagtaggagggtattttaggttggtgtagttgttttaagaataggaaatgttttgggagtagatttggaagtattattatataaaggtagaagtagtagggggaaattatagatatattaaatagtagaagtaagattaagtgtggagtatagatttagaagataagagtaatttgattttatttgtattagaagttatttttattatttgattttaggaaatggtttgaggagtagagaatgtatgttttgtttttttatataggatagttttttagtttgttattgtgttatttataaaattttaggtttgtttgttaaattgggttattataagaattagggggtgtatggtaagttttgagtagttgttgggggaagaagattttgtttgagatggtgaggggtttttaaataaaggatgaggggtgggttaggtaaggtattttttggttgtaatttatttggtatggtgattattttggttattatttaggtttgttgaggtttgtgatttaattgattggtagttgttatatttttgatgggatttagtatggtttgagatgtttgttgtgttgatagggtgaaagtaaggagaggatttgttttttagtgtttgagaagtttagttggaggtttttatagtaaggttaagagtttagtgagggttttagtttaaatttagaaaaagttaggttttatttttttggagttggttttggttaagggatgtaagttgttgtggtagaaaggatattggagggtagatggatgtgggtttaaattttgattttgttatttattagtagtatgattttggatgagtaatttaaattttgagttttggtttttttatttgttatatgatttgttggaagaatatatggaaaagtatttttttttttgtttttattttgggaatggagttttggttaaggagataaaatatttatttaataagtttagtagtttttttgtgtttaatttagttagattgtataaaggtgattttttaaggggttgtggaagggaggaagatgtttttattttgagataggtttttgattggttgggtattaaggttataggagagtggttgttggttttttggtttatgggtatttgtattaggagatttgttgtttgttaggatttgtaggttttttttttggtatagtggtttttatatttaggtatgtattattgttttttggagtgtttgttaaaatatatgttgttgggttttatttttagtgtgtttgatttagtaggtttagtgtg

SEQ ID NO: 2836 - DNA, 2460 bp, Artificial Sequence
  chemically treated genomic DNA (Homo sapiens)
tttgttttgggagattaagtttttttttgtttttagggtggtttagataaaggtggtggtgtgtttggttttttggtatttgggttgtttttttgttttttttttttttttgttttagggtatttgtagaggttttttttataaaggagttggaggatggggggtagggttgggtagttttaaggtaggggaagggagtattggtgaggttatgttttgttaggtttgattttttttttagttttgttatataggtatttagtgggtattaattgtggtttgttgaataatgattattttgagtattgagtgtggttagggtggggttttggtatatgtggatattattaatttttttgataagagatggggttttatatttaggttgaggaggggagtgtgttaagggagttattatttttttagtgtagttaagaggaaattgaggtttagagaggttgagttatttgtttaaggttatatggtttaaagtgggataaatttatttttgatttaggtttatttgattgttatagatggtatgttatttgttgttttaattgttatttaataaataattaataataaaaagagaaataatgaatatttagtaagtatttaatatgtggtaggtattgtgtttaaggtattatttatattaagtgatttaatttttttaataattttatgaggtaagaattgttattatatttattttatagatgaagaaattgaggttggtaaggtggggtaatgtattaaaggataaatagtaaggatttggtggagtgggttttaatttagttttttagaatttgtgtgttaaattatagttttattttggatggttggatgggggatggatagattgatggatgggattgatgattgatagttttgttttatttgtattaggtttgaggttgggtatttagtaggagtttagttagtattggttataagaatattgggtatttttatgtagtgtttgttggaggggttttatgtttttagtagggttggagtttgggggtggtgggtagtgtgtttgggttgttgggggggtttaatttttttttgagtagagttatggtggtatgatggatgtgtttgttattgtggggagtttagggtatagtagttgtttggaaataggttgtttttgtggtttatatttagatttttgttattattttaaggatttttttttttttttttttttttttatgatggagttagattttgtatgtaggtgagaaattgtagttaattttattagtagttttttgttattagggattatgggggtttttggggtttggttgtgggtggggaggtaggtgggtgttgggaggatgaggggaatttgtagtgggaagttagtgttttatgggtggtttagttgaggtttggaaaaattttgatgttggaatgttttttttattggttttattttttttaagtttttttgataaaaaatgaggttgagtttttttttttaatggtgtaatataagaagtattagtttttagagttgagggtgtgtttaaaggatttgggtagggttgggtttttggggggtttagagtaggggataggtgtggtgtttttagtatagtaggtattaattggtttttatgttggtggttttgagaggggattaattgggttttggggaattggttggggatggggttatgttttagttagggttgggtttggggataggagtgtggaggagtaatagtgaggattttggggttattttagtatgggtttaaattttagttttgttttttgggtaagttatttgttttttttgtgatttagttttttttttaatgaatggggaggatttaaaagggtggttatgagaattaaataatataatttgtgtaaagtatttagtatattagttgggtatggtggtatgtgtttgtagttttagttatttgggaggttgaggtgggaggattgtttgagtttgggaggttgaggttgtaatgagttgtggttatgttattgtattttagtttgggtgatagagtgagattttgttttaaaaaaataaataaataaataaataaaatatttagtatatagtaagtgtttaatgaaagattataggtgtgtttattttgagggttatggggtgtttggttttaggtatgttgttaggattattttatttttattttaagtatttagggaggtaggaagtttatagtttatttattggttataggtagaattgaggttttaggaggaatggtatttgtttagtgatattggggagtatgagatgttagattgatttttattttttatttgtttattaggtttttggttttattgttttagttattattttaatttttttgattagtagtgttgaatgttgattttgaaaattagattttaatgttgtttgttttaaatatttttgggttttttagtgtt

SEQ ID NO: 2837 - DNA, 2460 bp, Artificial Sequence
  chemically treated genomic DNA (Homo sapiens)
ggtattggggagtttaggaatgtttggggtaggtggtgttgaggtttgatttttagggttagtgtttagtattgttaattggggaggttgagatagtggttgagatagtgaagttggaagtttgatgggtgggtggggggtggaagttaatttgatattttatgttttttagtgttattaggtaaatgttattttttttggagttttagttttgtttatggttagtgagtggattgtggattttttgtttttttgagtgtttagggtgagaatgaaatagttttgatggtatgtttggagttaggtattttatggtttttggagtaagtgtgtttgtggttttttattgagtatttgttatatgttagatattttatttatttatttgtttatttttttgaggtagagttttattttgttatttaggttggagtgtagtggtatgattatggtttattgtagttttaattttttaagtttaagtgatttttttattttagttttttgaatagttgggattataggtatgtgttgttatgtttagttaatgtgttaggtattttatatgaattatattgtttgatttttataattatttttttaggttttttttatttattgaggagaaaattgagttataggggagataaataatttgtttaagagataaagttgggatttgggtttatgttggggtgattttagagtttttattgttgtttttttatatttttgtttttaagtttaattttggttggggtgtggttttatttttagttagttttttagggtttagttaatttttttttagggttattggtatgagagttaattagtgtttgttgtgttgggggtattatatttgttttttgttttgggttttttagaggtttagttttgtttagattttttgggtatatttttggttttggaagttgatgttttttgtattgtgttattaagaaaaaggatttagttttgttttttgttagggaagtttggggaaaataaagttagtgagagaagtattttagtgttgggatttttttaagttttggttgggttgtttgtggagtgttgattttttgttgtaggttttttttatttttttggtatttatttatttttttatttgtaattaggttttaagggtttttatggtttttggtgatagggggttgttggtggggttggttgtggttttttatttgtgtgtagggtttggttttattgtgaaaggaggaagagggaaaaaaaggtttttgagatggtgataaaggtttgagtgtgggttgtgagagtagtttgtttttaggtaattgttatattttgggttttttgtggtggtgggtatatttgttatgttgttgtggttttgtttgggagggagttgggtttttttagtagtttaggtatattgtttattgtttttaagttttggttttgttggggatatgaggtttttttggtaggtattgtgtgagaatgtttagtgtttttgtggttgatgttggttaagtttttattgggtgtttagttttaggtttggtgtaggtgggatagagttgttaattattagttttatttgttagtttgtttgttttttatttagttgtttaggatagaattgtggtttggtgtataggttttggagggttgggttgaaatttattttattaaatttttgttgtttgttttttggtgtattgttttattttgttagttttagtttttttatttatgaaatggatataataatagtttttattttatagggttgttgggaggattaaattatttaatataggtaatgttttaggtatagtgtttgttatatattaaatgtttgttaaatgtttattgtttttttttttattattaattgtttgttaggtgatagttggggtagtgggtagtatgttatttgtggtaattaggtagatttgggttgggggtgagtttgttttattttgaattgtatgattttagataggtggtttggtttttttgagttttagtttttttttgattatattggggaaataatagtttttttgatatgtttttttttttagtttaagtgtgaaattttattttttgttgggaggattagtggtgtttatgtgtgttagggttttattttggttatatttagtatttagaatggttattatttagtaggttatgattggtgtttattgggtgtttgtgtgatggggttgggagaggagttaggtttggtagggtgtggttttattagtgttttttttttttgttttggggttgtttagttttgttttttattttttagtttttttgtgaaaagaatttttgtgagtgttttggagtaagaggaggaggaggataagaaggtagtttgagtgttagggggttgggtatattgttgtttttgtttgggttattttggaggtagagggaggtttggttttttagggtagg

SEQ ID NO: 2838 - DNA, 2408 bp, Artificial Sequence
  chemically treated genomic DNA (Homo sapiens)
agttgtttttgaggtgtgaggataggaggggttgttgtttgaggttttttgtttatttttatttattgggattttttgtttggtttaggttttggataggtgtgttgtattggttgtagaggtggttttgggttgtataaggttggagtttattattttgggttttttttttattttggtttttgttattatttttttttattgttttagggttttttagtattttaaaaaagtttgtttaaaatttaaaaaaattattaatttttttagatttttttagtagggagggttggtttgaaattattttatttgttatttttttttttttttttttttttgttagggttttgttttgttgtttaggttggagtgtaatgggattttggtttattgtagtttttgttttttgggtttaagtgatttttttgttttagttttttgagtagttgggattataggtatgtattattatttttagttaatttttgtatttttagtagagatagggttttagtattttggttaggttggttttaaatttttgattttaagtgatttattttttttagttttttaaagttttaggattataggtgtgagttattgtgtttagttttatttgttatttttgtattataataatggttatggtggtaaaatgttttattgagtggtatggttgtttttatttttaatagttttttatttagggggtagttagtttattttttatttttttgatggggtggttatgattaatgttgttttagtaatgttttttttatatagggattattttttttggttagattttgataagtgttatttttgagttaataggtttttattaaatgttttagtgtgttttagtttgtattgttttgtgatatagggtagaggaggttttgtttttaaaagtggtttatgttgtagtagggggttttgaatgtttgtttttttagtggatggaggggaggggttaaggtaggttggagattatttttgggagtggaggttttggtttttttagtagtttttagttgtgtgttttttataggtggtgagtggttgtttgtgtggtatagtgagtgtgtgggaggttgtgatgggtaggaagatgatggagtttgttgtgtttgggggttagtatgtggagatgattgttatggttttggatgagttagagtggtgtttgtttataggtttgtgggatggtataatgaagatgtggaattataatattggtaaatgtttgttgattttttttagtttggaatagttggaggttagttttgtttgttaattatagttagggatggttttttgggaagtaaagtatagtttttttgattttgggatgtattattttttgtatttttttgaaagggtgtttattatagttaggtggtttggttttaaatttttttgagtttttgtgtttttatgtatgaaatgaagataggtaatagtgtttggattaatgggtttttattaaggttagttattgttgttttttaaatttgttagtattttttattttatatattggagttttggattgtatttttagtagtgggattagttaatttatagttatttatggttatttttatttgggaaatgtttgatggtattatagggttagtttatgggagtggtatagggtaaagttagtagttttattttaatttttgtgatatagttttttaattaatttagaaagtgtatttagttggttaggtagtggtttatgtttgtaattttagtattttgggaggttgaggtagggggattatttgaggttaggagtttgagattagtttggttaatatggtgaaatttttgtttttgttaaaaatataaaaaaaattagttaggtgtggtggtggttgtttgtaattttagttatttgggaagttgaggtaggataagttgggaggtggaggttgtagtgagttgagattttgttattgtattttagtttgggtagtaagagtgaaattttgttaaaaaaaaaaaaaaagaagaagaagaaagaaagtgtatttagttaagatgttaggggttgagtattgttttagattttattatttagtagtgatttgattttagttaggttatttgtttattttttagttattttttttgtaaaatggatatggatgtttattttattttatttttttaagtttattaaatgagggaataggatgtgagaatatgatgataaatatatggtggtattatttgtaggtgatttttgttatttagagatttgattttttgtttggtatttttaggaagatatttagggtttagagttattttttttgataagttttttagttttgtttttttttatttttaatagattagtgggattatttatatgaataaagtgttttatg

SEQ ID NO: 2839 - DNA, 2408 bp, Artificial Sequence
  chemically treated genomic DNA (Homo sapiens)
tatagaatattttgtttatatggataattttattaatttgttgaagatgaaagaaaatagaattagaaaatttattagagaaaatggttttgggttttaaatgtttttttaaaggtgttaagtaagaagttaaatttttggatgatgaaaattatttataggtgatattattatgtatttgttattatgtttttatattttatttttttatttgatggatttaggggagtgagatagggtaggtatttatgtttattttatagagaggatagttgggaaatgggtaagtgatttggttaaggttaagttattattgagtgataggatttggagtagtatttaatttttggtattttggttaagtatatttttttttttttttttttttttttttttttttgatagagttttatttttgttgtttaggttggagtgtgatggtgggattttggtttattgtagtttttattttttggtttgttttgttttagttttttgagtagttgggattataggtagttattattatgtttggttaattttttttgtatttttggtagagatgggagttttattatattagttaggttggttttgaatttttggttttaggtgatttttttgttttgattttttaaagtgttgagattataggtgtgagttattgtttggttagttaagtatattttttgagttggttaaaggattgtgttatagaagttagggtggaattgttggttttgttttatgttatttttatggattggttttataatattattaggtattttttaaataggggtgattatgggtggttgtgaattaattgattttattgttagaaatgtaatttaaagttttagtatgtggaatgagaagtgttagtaaatttaaagagtaatagtagttaattttagtggaaatttattagtttaggtattgttatttgtttttattttatgtatgaggatatagaggtttagggaggtttgaagttaggttatttgattatgatgaatatttttttagagaggtataaaaaatagtgtattttagggttaaaggagttgtgttttgttttttaagaggttgtttttggttgtaattgataagtaagattgatttttagttgttttggattgggaaaggttaataggtatttgttaatgttgtagttttatatttttattgtgttattttgtaaatttgtgagtaggtattgttttgatttatttagggttatggtggttatttttatgtgttggtttttagatatagtaaattttattgtttttttgtttgttatgattttttatatatttattgtgttgtgtaggtagttatttattatttgtagggagtatatagttgggggttgttggagaggttggggtttttatttttaagggtggtttttagtttgttttggttttttttttttatttattgagaaaatagatgtttagggttttttgttatagtataagttatttttgaaaataggattttttttgttttgtattatagggtagtgtaaattggaatgtattggaatgtttggtgaagatttgttaatttagaaatggtatttattaggatttagttaaagaaaataatttttatatggaaaagatattattgaaataatattaattatgattattttgttaaaaaaataagaaataaattaattgttttttaagtagggaattgttgagaataaggatagttatgttatttaatgaaatattttgttattatgattattgttataatgtaagagtagtaggtaaggttgggtatagtggtttatgtttgtaattttaaaattttgggaggttgaggagggtggattatttgaggttagaagtttgagattagtttggttaaaatgttgaaattttgtttttattaaaaatataaaaattagttgggggtggtggtgtatgtttgtagttttagttatttgggaggttgaggtaggagaattgtttgaatttggaaggtagagattgtagtgagttaaggttttattgtattttagtttgggtgatagagtgagattttggtaaaaaaaaaaaaaaaaaaaaaagtagtaagtgaggtggttttagattaattttttttattgagaagatttagaaaagttgataatttttttaaattttaaataaatttttttaaggtattgaagagttttgaggtagtgagagagggtggtggtaggagttaggatgggagagaagtttagaatggtgagttttagttttgtgtagtttaaggttatttttgtagttgatgtggtgtatttgtttagagtttgggttagataagaggttttagtgggtgggagtgagtagagggttttaggtagtagttttttttatttttatattttagaagtaatt

SEQ ID NO: 2840 - DNA, 2461 bp, Artificial Sequence
  chemically treated genomic DNA (Homo sapiens)
aattttagttgttagggttaagattagttatgtgttttttttttttggttatggttttggatattttaagttggtagtgagtgttaggtgagggggttgttaggagttggtaggggggattttatttttgtgttatttatgtttttaattaggggtaatttttttaaatttgtatttttaaattttttttttagtttgattggagaaattattttaatttttaatgatagtaattttaaattatagtaataataatttattgagtgtttatagtgagttagatatagtgttagtattttgtattagtagtttttaaattttttggttttaggaattttttatattttaagaatgattaaggtttttaaagtttttgtttatgtgggttgtatttattattaattattattttaggagttaaaataaattttaataatatttatttataatttatttaaaatagtaataataaatattatatgtgagtataaataatatatttttatgataaataattatattttataatatataaaatttaaagagaaggaagtgtggttttgttttatatttttgtagatttttataatgttagttttaatagaagatagtttgatttttatatttgtatttgtaagtttttgagatattatatgttatgtagtttttgtaatattttattgggagttttaaaaagtttttattgagagtaaaaaatttttataaataatatgtttgtattattgttaatattattttgaattttatggattatttgaaagggttttagagattttagaggtgtttataatatattgtggaaattgttgtttgatatatatgatgggtagtttttaatattgttttatttttatatatgaggaaattgaggtataaggagattaaagtgatttgtttaaggttatgtagttaggtattaaagttagttggggagttatttgattttggtgtttagggttttagtattgagttttgaaagagagggtaggaattgggtatagaaaaagttggaagggtaggttgggttatgagtgggggagttgggtgtgtagtgaggggtgggggtgggaggggattgggggattagttagttattaagtggttttggtgatagggttggagatggtagttggtggtggatgtagttttgggttggaaaattaataggtgattagtggtttaggggtaagttgtttattaggtgtggtagaggggtaggggtaggggtgggggggttgggaggaaatattattgatttttggtaggattgattaaatagttagatatttaaggttaaatttattaataaagtgagatatttagtttagtttggtggttgttgttgaaggttttaaaaaaattgtttattggggagtttttgataaattgtttttgttttttgaggtaagtgggagggaggatagattgtggggaggtttggtttggttgttgtttggtttgggatttatggtttgttttaggtttggattatagaattttggtgtttgtatggtatgtgtgtttgtattatagtatatgttatttgtatagggtatgtgtagatatatatgtgtatattatgttgtatatatttaaatgtgtttgtatatgtttttgtatgtttgtgtatatgttataatttatatttgtttatggtatgtgtgtatatatatgtatgtgttatagtatatgtgtataaatatgttttgtatgtgtgtatagatatgtgtgtattgtattatatggtatttatatatgtatatgttatggtatatatgtgggtataaatgtgttttgtatgtgtgtgtatatgtgtatgtgttgtagtatatagaatttgtttttgaggggtgagtatgtgtgtttgggggttaaattttttttttattgttttattgatattattattttttttgtttgtagttttaaaggtgttatatttgtaatgatagttatgattattatggggtggggagatggatggaaaagtagggattggaaaattgtatttaaaaggttaagttgtataatagagagaggtaggtgtgaataggaagaaagagggggaggaaaagtgaagggttggtatggtaagggttaaatattgtttggattgggagttgagggagagaaaatggtaggatttgggggtggttgggtagttgttgggggagtaaattaaagaataaaggatatgtaaatataatttttatttttattgatttattttttttaagatagagttttattttgttttttaggttggagtgtagtggtgtgattttagtttattgtaatttttattttttgggtttaagtagtttttttgttttagtttttagggtggttgggattatagttttatgtagttatgtttggttaatttttatatttttagtagagatagggttttattatattgtttaggttggttttgaat

SEQ ID NO: 2841 - DNA, 2461 bp, Artificial Sequence
  chemically treated genomic DNA (Homo sapiens)
gtttgagattagtttgagtaatatggtgaaattttgtttttattaaaaatataaaaattagttgggtgtggttgtatgagattgtagttttagttattttggaggttgagataggaaaattgtttgaatttaggaggtggaggttgtagtgagttgagattatgttattgtattttagtttggggaatagaatgagattttgttttaaaaaaaataaattaataaaaataaaaattatatttgtatattttttattttttaatttgtttttttaatagttatttagttatttttgaattttgttatttttttttttttaatttttagtttaaatgatgtttagtttttattatgttggttttttattttttttttttttttttttttttgtttatatttgtttttttttgttgtatagtttagttttttagatatagttttttagtttttatttttttgtttatttttttattttataataattatgattgttattataaatgtggtatttttgggattataggtagagaaagtggtgatattagtgaaataatggagaaagagtttaatttttaagtatatatgtttattttttaaaggtagattttgtgtgttatggtatatgtatgtatatgtatatatgtaaggtatatttgtgtttatatatgtgttatagtatatgtatgtgtaaatgttatgtgatgtggtgtatgtatgtttatgtatatatgtaaggtatatttgtatatatgtgttgtagtatatgtatatgtgtgtatatatattataagtaaatgtaggttgtagtatgtgtatgggtgtgtaaagatatgtgtaggtatatttgaatgtgtgtgatatagtgtgtatatatgtgtttgtatatgttttgtataaatggtatgtgttgtagtgtaagtatatatgttatataagtattagggttttgtggtttagatttggggtaaattatgagttttaggttaaatggtagttgagttaggtttttttatagtttgtttttttttttatttgttttaagaaataaagatagtttattaagaattttttagtaagtggtttttttaagatttttagtagtagttgttgggttgagttgaatgttttattttattagtgagtttggttttgggtgtttggttgtttgattaattttgttgggggttagtgatatttttttttagtttttttgtttttgtttttgtttttttgttgtatttgatgaatagtttgtttttggattgttgattatttattgattttttagtttgaggttatatttgttgttagttgttatttttagttttgttattaggattatttggtgattaattgattttttggtttttttttatttttattttttattgtatatttagtttttttatttatggtttaatttgtttttttggttttttttgtgtttagtttttatttttttttttagggtttagtgttgggattttggatattaaaattaagtgattttttagttagttttgatgtttggttgtatgattttggataagttattttaatttttttgtgttttagtttttttatatgtaaaaatggggtaatattggaagttatttattatgtatattaggtagtagtttttatagtgtattatgggtatttttggggtttttgagatttttttagatggtttataaaatttagaataatgttgataataatataaatatgttatttgtgggggttttttgtttttagtgaaagttttttaaaatttttagtggaatattataggggttatatgatatgtggtattttaaaaatttgtagatgtagatataaaaattaaattgttttttattaaggttgatattatagagatttgtaaaaatataaaataaagttatatttttttttttttaaattttgtgtgttgtgaaatatagttatttgttataggaatatattatttatgtttatatgtagtgtttattattgttattttaaataaattataaataaatattattaaaatttgttttgatttttaaaatggtaattagtgatagatataatttatatgaataagagttttgagggttttgattatttttagggtgtaaagggtttttgaagttaaaaagtttgagaattgttggtataagatgttagtattgtgtttggtttattgtaagtatttagtaaattattattgttatgatttggagttgttattattgggagttagagtgatttttttagttaagttggggaggggatttgggggtgtagatttggggaggttgtttttgattagggatataagtggtataaaggtgagattttttttgttggtttttagtagtttttttatttggtatttattgttagtttggagtgtttaaagttatggttaagggaaaggagtatgtggttgattttggttttagtagttgggatt

SEQ ID NO: 2842 - DNA, 2417 bp, Artificial Sequence
  chemically treated genomic DNA (Homo sapiens)
tatagtttgagtatatttatttattttttattatttatattagaatatttgaaattgggtgatttatgaagaaatagaatttattttttatagttgtggaggttgaggagtttaagattgagggtatgtatttgttgagagttttttggttggtggtgtagagttttgaggtggtgtaaggtattatattatgaggggtatttgtttgttatagtagtaagtataatttaagttaattttttttgtttatggagaattttttgttagtaagagaaatgaggtatttatttaagtgttttagtatagagatgatttataggaattttagattttggaggatgattttttatggtgatattaggttgttttgttatgtggtataattgtaggaggagttatttatattttttatgtgaatagtattttttgtatttgtataatttgttattttgggtaggatttttagaggagtgggtttgttgttgagattttaaggatgagtaggaattttatttatggagatggggaaaagttattgtagttggatgaaatagaagggatagagatatagtatatggaaaattagaggtatgtatgtgtgtagtagtaatagttattagtgtttattgagtaggaatgataggttagatagtgtgttaagttttttatatatattagtttatttaattttataatagtttgtgtaaatttagatattttggttttagagtttgtgttttaaattttttaatagattttgtttattattattaatattggtatagtattttatagtttataaaatttttttggatttatgatttgtttttattatggtaatagagtaattgtttttattttataggtgaagaaatagtattaatggttttgtgatttgttaaggttatatagagagtaaattgagaggttaagatttgaattttattttttggttttagataaaggatgttatagtaaggtgtttgtaaagtagtttttttttttttttttgttttgtagggaggtgaggtgtttatatttagattattataaggagttgttgagagaatgtttttaggttatgaatttagttttatatgtaaatttattgtagatttaggagaaggttaggaataaatgggtgggagaaggtttttgattttaaatagaaattgagttgattaaatatagtttgagtatatgtagaggttgtaggagggaaatgagattaattttaaattttgtgtatttagaagttttttttagaatttaggttttattggtaggaaattgttattttgtgtatttgtttattttttttatgttttttgttaggttttgtgttttattgagtttttattttttttgtgtatgtttataggttgttgggttggaaatagtttaaagttatttagattattttaggtattgagttgtattaaggatattttttgtgggtagagtaaagatatgtttttattttttagttgggtttattgaggtttttttttattggggaattggttgggtttttttggtagagatgtttgttatttattaaaaatgtatgttttttttattgtggtatagagttgtttttgagaaatatagtttaattaggaattatattttttagttaattttgtagttaagtgaggttatgtgatttgtttttattaatggaatatgaatagagtgataggttttttatttgggtaaaatagagttgatgtgttttttttatatttttgtttagtttttgtttggatttagattttagggaatggtagagttataagatgaaagtaaattgggtatttataaagagaaaatatttgtgttagtttattaaaatgatgagagttatttgttatagtagtaagtataatttgaattaatatatttttttttttgatttttggtaattttagttttttatggagataggggttggaatattatttgtttttttaaagagagttgtaatttattgttttttgttgtgtgttggttttatttttatatttggttttttgttttagtttttttgaatagaatagtagattttttttaagatagaggtgatttttatttaagtttatttgggattgattgtttagttttggttaatattaaaatgtgttaagattttagtgttataattaatgtttatttattttttaatttatgtggttattgtttagtaattttgttattgtatttgttttttttgaggttgttattggttgggtttgggttttaaatagtttttagttgtattggtggtttgatattagaaatttgggagaagaatggtgtaagaggaagagtgtattagtttatttttatgttgttgataaagatatatttgagattgggtaatttataaaaaaaaagaggtttaattggatttatag

SEQ ID NO: 2843 - DNA, 2417 bp, Artificial Sequence
  chemically treated genomic DNA (Homo sapiens)
ttgtaagtttaattaaatttttttttttttgtaaattgtttagttttaggtatgtttttattagtagtgtgaaaatggattaatatatttttttttttatattattttttttttaagtttttggtattaagttattagtatagttagagattgtttggggtttaaatttagttagtagtaattttaaagggaataaatatagtagtagggttgttgagtagtggttatatgaattggggggtaggtggatattaattataatattggagttttagtgtattttgatgttgattaaggttgggtagttagttttaaatggatttggataagagttatttttgttttaaggggaatttattattttatttaggaaaattgaggtaggaaattaggtgtgagggtgaagttagtatataatagggaataatagattatagttttttttgggggaataagtggtattttaatttttgtttttatggggagttaaagttgttaagagttaggaaggaagatatattaatttaagttatgtttgttgttataataaataatttttattattttagtaaattaatataagtattttttttttatgggtatttagtttatttttattttgtggttttattattttttagggtttgaatttaggtagaagttgagtgagaatgtggagaaagtatattaattttgttttgtttaggtgagaagtttattattttgtttatattttattggtgagaataggttatatgattttatttagttgtaaggttagttgggaaatgtagtttttggttgggttgtgttttttagagataattttatattatagtggggggaatgtgtatttttgataagtagtaggtatttttgttagaggagtttagttagttttttaatagggggaggttttagtgagtttaattggagagtgggagtgtatttttgttttatttataagaaatatttttgatataatttagtgtttgaaatggtttgaatggttttgggttatttttaatttagtagtttgtggatatgtatagagaagataaggatttagtgaaatatggagtttggtagaagatatgggaaaaataaataaatgtatgaagtgataattttttgttagtgggatttgggttttggggaaagtttttgagtatatagggtttgagattaattttgttttttttttgtagtttttgtgtgtgtttaggttgtgtttgattagtttagtttttgtttggagttaaggatttttttttatttgtttatttttggtttttttttggatttgtagtgaatttgtgtgtaaggttgaatttatagtttgaggatatttttttagtagttttttgtaatgatttaaatatagatattttatttttttgtagagtagggaggaagaaagagattgttttgtagatattttgttgtggtattttttgtttaaggttagaggatggggtttaagttttggttttttaatttattttttgtgtaattttgataagttataagattgttagtattgtttttttatttgtaaaatgggaatagttgttttgttgttataatgaaaatagattatgagtttaaaagagttttgtaaattgtaaagtgttgtattaatgttagtgatagtaggtaggatttgttgggggatttaaagtataggttttggagttagagtgtttgaatttgtataggttgttgtgagattgagtgagttaatgtatgtaaagagtttagtatattgtttggtttattgtttttgtttagtagatattggtggttattattgttgtatgtatgtatgtttttggttttttatatgttgtgtttttgttttttttgttttatttagttgtagtggtttttttttatttttatgggtggggtttttatttatttttggagttttagtaataggtttatttttttgggaattttgtttagggtggtaggttgtataaatatggggagtgttgtttatatagaaaatgtgaatggttttttttgtagttgtgttatatggtagaatagtttggtattattgtgagaaattattttttagagtttgaagtttttgtaagttatttttgtattaagatatttgggtgaatgttttattttttttattggtagagagttttttatgggtagggaaggttagtttgggttatgtttgttgttgtaataaataagtgttttttatgatgtgatgttttgtattattttggggttttgtattattagttagaaggtttttaatagatgtatgtttttagttttagattttttagtttttatagttataagaaataagttttatttttttataaattatttaattttaggtattttgatataagtaatagaaaatggatgaatatatttaggttgtg

SEQ ID NO: 2844 - DNA, 2486 bp, Artificial Sequence
  chemically treated genomic DNA (Homo sapiens)
gttaaggaatttggatatttgtagagtttagttagattgtatataatgttagttgggtgtggtggtgtatttttgtagttttagttatttaggaggttgaggtaggagaattgttttaattttagaggtagaggttgtagtgagttgagattgtattattgtattttagtttgggtaatagagtgagattttgttgtaaaaaaaaaaaaaaaaaaaaaaaaaaaaagattttatataattttaaatgatggttgtttgattattttttttttatattatggattatttttgttgttatatatttatttgttgattgtttttttttttattagaaaggataaggattttgtgttgtttattgttgtgtttttaatagttagaagagtgtttggtttatatagatatttaataaatatgtattgaatgtatgattttattggtttgtgttttttgtttattgagttattgaaagttagggatttgttggatttattattgtgtttttagggtttagtatagagtttgatgtatatgttgtttaataaatattgaaagaataaatgaatggaaaaatgttttttttaatgtgttatatatttttgtagggttgggattatttgatttatgtatttagtgtttaatatattgtttggtagaaagtagatttttaataaaggtttgttgagttagataagagttttttttgtatgtgggtttttgttaggtttgttatgggagtttaaataaaggtaattagattttatattattggattaggtagaaagagatattttgttggtaaaggattttaggattttggagttataggttgtgtaggtaggattagtttgtatgtgtagggtggttagagagattaaagagggttttttgggggttaggaattttgtttttgtttatgttttttagtattgtttttttttggtaattggtaggtagttttattaatgaggtttgggtatagttgggggtggaatgggatgggatagatggtgggagataaggaaatttttatgtttttttttatttgttatatttaattgattttttgtagaaagaaaaaaaaataaattagttgtaaggatgaaattgttaattaaaaggttttttgattagatagataaatatttattaattatgtttgattttgtttgtttttttttatgtttgtgaatttttttattagtattgtggttatattatatttagttggtggtttttttattaattatttttttggggtttagattggttgtgggtgaaatagggtagaagaaaggtgaatattgtaaatagttgtttaataaatgtgatgtttgttgtatggttaggtttagtgttgggtttttggaagttatagtagaatttttatggatagttttttaagttgtgtgttgtataaaggtgtatttgtaggagagtgggggttttttttgttaatttgggatttttggtattaggtaagggggatttttattttttttgtgtaatgggttattagtttgttaagttgaatttataggattttgtttgtttagagggggtatttttttttaatttatatagaatgggttagtggtagttttatagagatgaagatagtttagtttttgatttttaagggttttagggatagtgggggagaaaaatatgtttatgatgtataaatatttatgtgtgatttttttttttttttttttttttttttttttgaggatagggttttattgtgttatttaggttgagtgtagtggtatgattatgatttgttgtagttttgagatttttttttttttagtagttttttgaggagttgggattattggtgtgtattattatgtttggttaattttttattttttgtagagataagatttttttatgttatttaggttggttttgaatttttggatgtaagtaatttttttgttttagttttttaaagttttgggattataagtgtgagttattatgtttggtttaaatatttatttaataaatattttttgtttattggttattaatgtttgttaagtattgtattagattttgggagagagagagatgagtaatatatgttttttgttttttagaagttgggttatttgggggagatagagatatttatttgggtttgtttttttttttttttttttttttttttaattttaaataatttttatttgggaggtatgaataattgttttggatttttattatttaaattttggttttattgtgttttggttgtgtgattttgggtaagttattttatttttttttgttttaggttgtttttttgtaaattggagataatggtaattgtattttagggttattataatgattaaataaattagtatatggaatttatgtttgatatggagtgtttagtaaaggttagttattgtgtgattgttttttttttttttttgagtgtttattgtgtgttaggttttgagttttgg

SEQ ID NO: 2845 - DNA, 2486 bp, Artificial Sequence
  chemically treated genomic DNA (Homo sapiens)
ttaggatttagggtttggtatatagtaggtatttaaaaaaaaaaaagaaatagttatataatagttaatttttattgagtattttgtgttaggtatgaattttatgtgttaatttatttaattattataataattttgggatgtagttattattatttttagtttatagagaggtaatttgaggtagagagaggtgagataatttgtttaaggttatatagttaagatatggtaaagttaggatttgaatggtgagagtttagagtggttatttatattttttaggtgaagattatttggaattaaaaaagggaaggggaaaaaggaagggtagatttaggtaagtatttttgttttttttaaatagtttggtttttggagggtaggaaatatatattatttattttttttttttttagaatttagtatagtgtttggtaaatattagtggttagtaaataagaaatgtttattgaatgaatgtttaagttaggtatggtagtttatatttgtaattttaggattttgggaggttgaggtaggaggattgtttgtatttaggagtttgagattagtttgggtaatatagagagattttgtttttataaaaaatgaaaaattagttaggtatggtgatgtatattagtaattttagttttttaggaggttgttggggagagaggggttttaaggttgtagtaagttgtaattgtgttattgtatttagtttgggtgatatagtgagattttgtttttaaaaaaaaaagaaaagaaaaaagaaaaaaaattatatatgaatgtttatatattataggtatattttttttttttattatttttagagtttttgaggattaggaattgaattatttttatttttgtagagttgttattagtttattttgtgtgaattagaaaaaggtattttttttgggtaggtaaaattttgtggatttagtttggtaagttaatgatttgttgtgtaaagaaaataaaaattttttttgtttggtgttaggggttttaggttgatagggggagtttttatttttttgtaggtgtatttttgtgtagtatataatttgaaaggttgtttatggaaattttgttatggtttttaggggtttagtattaagtttgattatgtaataggtattgtgtttgttgaatggttgtttgtagtatttattttttttttattttattttatttgtagttagtttgagttttaagagagtgattggtggaagagttattagttgggtatgatgtggttatagtgttgatgggggagtttgtagatgtaaaaggggataggtagggttaggtataattggtaaatatttgtttatttaattagagggttttttaattagtaattttatttttgtaattggtttatttttttttttttttgtgggaagttaattaaatgtaatagatggaggaaaatatgggggtttttttgttttttattatttgttttattttattttatttttagttgtgtttaaattttattggtggggttgtttgttagttgttagagaagggtagtgttaggggatataaataaaggtaggatttttgatttttgggaagttttttttggtttttttggttattttatatatgtaggttgattttgtttgtatagtttatgattttagggttttaagattttttgttaataaggtatttttttttgtttgatttagtagtatagggtttggttgtttttatttgagtttttatgataggtttgataagggtttgtatgtagaagagatttttgtttagtttaataaatttttattgagggtttgttttttgttaggtaatgtgttgggtgttagatatataaattaaatagttttggttttgtgggagtgtgtaatatattggggaagatgtttttttatttatttatttttttaatatttattaaatagtatgtgtattaagttttgtgttaggttttggggatgtaatgatgaatttaataggtttttgatttttaataatttagtaagtagaggatataggttagtaaagttatgtatttaatatgtatttattgagtgtttgtgtgagttaggtatttttttggttgttggggatatagtagtgaatagtataaagtttttgttttttttagtagggggaaagataattaatagatggatgtataatggtaggggtgatttgtgatgtgaagaaaaaatagttaaatagttattatttggagttgtatggaatttttttttttttttttttttttttttttttgtgatagagttttattttgttgtttaggttggagtgtagtgatgtaattttggtttattgtaatttttgtttttggagttgaagtgatttttttgttttagttttttgagtagttgggattataggggtgtgttattatatttagttagtgttgtatgtaatttaattgagttttgtaagtatttagattttttggt

SEQ ID NO: 2846 - DNA, 2463 bp, Artificial Sequence
  chemically treated genomic DNA (Homo sapiens)
agttttgttttattttgtagatgttatatttttattttatttttttggggttttatgggtatagtgtattagttttggattggatggtaatgttttttagttttagttttatgatatttttggtattaagtgatagtaattgttgttgtagattttaggttaggagtggttttgtatgtttttgagtttaaggtgtttttgatggtattgttagtgtttttattggggtattttattttgtatatttttttgaaaggtaattttattttgtatattttgtttttggttaatttagtagttttatagttttttttgagattttgagtttgtaatgaggtttttagagattggaattttatagagtttttggttattgttttgaatttgtatttgtggatttaatttttggtgatttaaaggtaattaattttggggtggaattttatgagttggttttttaggagagaattggtagtggtagttagaggaagtgtgtgagaggttttgtttagtagggtgagtatatgttttgtttatttgaggtattgatagtggtagaaattaaaggaaaggagtagaggtagagtggtttggggtattataatgatttgtgtagttagatgtgtttggtgttgatgttagatgtgttttttttattgatgatagtggtaataatagtattgatttttttaatattattgaggtttattatgtgttaggtattgtgttaaaaatatttagtttttatggaagttttgtgatgtaggttttatttttatttttattgtatagatgaagaagatgaggtataataatttgtgtaagtttatatagttaatgtgttggagttaggttttgaattttgatagtttgattttagattattttttttttttagtatttatgttttggtgttttttgtggtatatttagaagatggtttgtatgtgtatgtgtttatttttgtgtgtgtgtatgtatgtatgtttatgtaggattgggaatgtaggggagttagagtttagttaggaaggagagaggaaatatgatttttttgttgtatgtgggtattgtaattttagttaggtaaagtgttggtttgttgtagtttatttttatgtttttatttagaagttttaatattagagttgatggtagaaaatgtgtagtaaaatgtggggaggttgttgggtaatggtttttgtaaagtgttaattgtttattgagattgtagattttgtttatgttttaggatttgaattattgataggttttaatttattttgggtttataaagtgggttttttttttaaataggtttttaattagttatgtttttttgggtttgttaagaagttttagttgataagtatgtttgttgttttaattttttgaagttggttgtgtggtttgattttggtttgttttaaggaaatttttatgtataatggttttggatgaaaatttatgagaattaagtgttgattttgtgttgggtttttagttgggtgttttatatgtattgtttttgatttttattgtttagagaagtaggtagtatttttttaaggatattttaattttagagaagttgaattaattgtttaagtgattattatgattatattttagattgttatgggttaaattgtgtttttttaaatttatgttttgaagttttagtttttagtattttggaatgtgattgtatttgaatatagggttattaaagaggtgatttagttataatgaggttttagggtgggttttgatttaattttattggtgtttttttaagaagaggaaatttggatatagataaatatagaggggtgatttattggaagatatagggagaaggtagttatttatagattaaggggagaggttttagaagaaattaattttgttgatattttaattttaaattgtaagtttttagaattataaggaaatgaatttttgttgtttaagttatttagtttgaggtattttgttatggtagtttgagtaggtgattatatatatttaggatttggtgtggttttgaatttatgtatatgattattgtaagtatgaaaattttgttttttggtttatggttttagttagaataagaagtagaaagtgggtaatattatttttttgtagtaaatttgtttttaggttgggtttttaaagggtttatgtttatttattagaaagaaaaagaaagttagatttgggattttaagtgtaaaaagaagttattgattgtttttaagtagagttagtaatataattagaatttttttttttttttggaaaaaatagttttttttggttattgtgtatagagaatggatggtagaatataaaagtgaagtaaggagattttagaggaggttgttgtattgtaggtaagagatgaaagtgatttgatggagagtggtggtaatagagaaggaaagaggtgaatagatt

SEQ ID NO: 2847 - DNA, 2463 bp, Artificial Sequence
  chemically treated genomic DNA (Homo sapiens)
aatttatttatttttttttttttttgttgttattattttttattaagttatttttattttttgtttgtagtgtaatagttttttttggggtttttttgttttatttttgtgttttattatttattttttatgtatagtagttagaggagattattttttttaaaaaaagaaagaaattttgattgtgttattgattttgtttagaaatagttaatgatttttttttgtatttagaattttaaatttagttttttttttttttttaatggataggtatgggttttttgaggatttaatttaagaataaatttattgtaaagaggtaatattgtttattttttgttttttattttaattggagttataagttagagaatagagtttttatatttatagtggttatgtgtataaatttaaggttatattaagttttgggtgtgtgtagttatttgtttgggttattataataaaatattttagattgggtggtttaagtaataggaatttatttttttataattttggaggtttgtagtttgagattaaggtgttagtaggattggttttttttgaggtttttttttttagtttgtagatggttgttttttttttgtgttttttagtgggttatttttttgtatttatttgtgtttaaattttttttttttgaaagaatattagtaagattagattagggtttattttaagattttgttgtagttgaattatttttttaatggttttatatttaaatatggttatattttaaggtattgagagttagagttttaaagtatgaatttgagggaatatagtttagtttgtaatagtttgaagtataattatagtggttatttaaataattaatttaatttttttgaggttaggatgtttttgaagagatattatttgtttttttaagtggtaaggattagagataatgtatgtaaaatatttagttgggagtttagtatggagttagtatttgatttttatggatttttatttaagattattgtgtatggaagtttttttaaggtaagttagaattagattatatgattagttttaaagggttaaggtagtaaatatatttattgattggagttttttggtaggtttagggaagtgtgattgattggaagtttgtttagaggaggagtttgttttgtgggtttgaaataaattagaatttgttaatagtttagattttggagtatggataaagtttgtagttttaataggtaattaatattttataggggttattatttagtggtttttttgtattttattgtatattttttgttattagttttggtattgaagtttttaaataaaaatataaaaatgagttataatagattagtattttgtttggttggagttatggtgtttatatgtaataaagagattatatttttttttttttttttaattggattttaatttttttgtatttttagttttgtataaatatgtatgtatgtatatatatagaaatgagtatatgtatatgtaggttattttttgagtgtgttataggaggtattagagtatggatattgggaggaagaggtggtttggagttagattgttggagtttaaagtttgattttggtatattaattgtgtgggtttgtataaattgttatgttttattttttttatttgtataatgggagtaagaatagagtttatattataagatttttataaagattaggtgtttttagtataatatttggtatataatagattttaataatgttaaagggattagtattgttgttgttattattattaatgggaggagtatgtttagtattaatattgagtatatttaattgtatggattattgtaatgttttaagttattttgtttttgttttttttttttggtttttgttattgttagtgttttgaatgagtaaggtatatgtttattttgttgaatagagttttttatatattttttttagttgttattgttaatttttttttaggaagttaatttatgaagttttattttaaagttgattgtttttggattattaggagttaaatttataggtgtaaatttaaagtaataattaggaattttgtgaggttttagtttttgggaattttattgtaaatttaaggttttagagaagattgtggggttattggattggttagaagtaggatatataggataaaattgttttttaggaggatatgtaggataaaatgttttagtgaggatattggtagtattattaggagtattttgggtttaggagtatgtaaggttatttttgatttgaagtttgtagtaataattgttgttatttgatgttaaggatattatggagttagagttagaggatattattatttagtttagagttggtgtattgtgtttatggagttttaagaaggtgggatgggggtgtagtatttgtaaggtagagtaggatt

SEQ ID NO: 2848 - DNA, 2461 bp, Artificial Sequence
  chemically treated genomic DNA (Homo sapiens)
tattattgaggataattgttttttgagttatatttttattattaggtgttatattatagtaatgttttatattatattattttattttatttttgtgaggtagggtttttgttgtttaggttggagtgtagtagtatgaatatagtttattgtagtttttattttttgggtttaagtagtttttttattttagttttttaagtagttgagattataggtgtgtgttattatttttggttaaattttttaattttttgtatagataaggttttattatgttgttttggttggttttgaatttttgggtttaagggattttttttttttggttttttaaagtgttgggattataggtatgaattattatgtttggttttattgtagtattttaaatttagattggaaaattagtaattaaaagtgttaaatatagaattattaaatagatggattaaagatatattaagtttttggtaagaataatagttttggattgataatttttgagttaaaggatagttgtgtttttagaatgagagtataattagataattgattggtttatttttttttttttggttggtgttgtattttggttgtaaatatgtatgaagtgtgtgtatgtgaatgtgggattggagggaaattatgagtatttaattaggtatgtttatatgtgatttgtgtgtttatgtgtgtgtgtgtgtgtttgtgtgtgtgtatgtatgtgtttgtgtgtttttgtgtttttatatatgggtttgtgtgtatatgtgtgtgtgtttgtgtatatttgtgtgtatgtgtgttgtgtgtttgaaggtaaattttaagaaggtaggggttatgtatttagtatagttattggtatagaataaatatttattatttgttaaatgaatgaatgaatgtgtatgtgtgtttgtgtgtgtgtgtgtgtatgtatgtttatatgtgagtgtgggtgtttgggtttttgagagtggggttattaatgtttgagtgggtgtgagggttttatatttgattatgtgtttaggtttttgtaagtttagaatttgattatgtagagataatgaatttttttgtatttttttgatttttatttgtgtttttatttattttttttagggttttttttgtttggggagttattttttttattagtttgtagttagtttttatttggatttttatttttgtgtgttttttggaggatatagatggtaggagtatggaattggaagtatttggtaatgaagtagtaatttattttgtaatttttttgtatttattgtaataatgtttgttttgatgggttttgtgtgttgaatgtagtttttaatgtgtaatttagtgggaattgtggtgttttgtggtttttattatgtttatttattgttaagtgttgttgagaatttttttatttgggatgagggaattatttgttttagtaattgatttttgaaattttttttgggttggggtatttgtgaagtttttggtgatgtgttattgtttttggtttgtgttttggatatttatgtgttttgttgaagtatgtaaattgttataatgtgaggaaatgtgatataaaaataattttggggtaataaatattagaggagttttaagattggtatagttttttttggttttgttttggggttagggagtattttttgttggtagtgttggtagtaaaggtttgagatgttttggaatgattattgtttatttttttgtagttgtttagttggtttgttggagaagggtgggtgagattttttttaggaaggtaggaatagttggatgtggattgttttttttttttgtagttggttaatagaattataggttttgttttggttaaagggaatttgttatttttgattatttaggtggttgtatatatttaggggtaaatttatatttattgttggttgtttatagtttgtttattttgttagtagggggttgttttttaggattttaggttaggtggttttagttgggatttattgggaagtattgatggggagtggaggatagtggaggggaggatggagataggaggagttgggaaagtttttgttttttttttttttttgatttagataatgtttttaggagtagttggttttttttgtggatttagattttaaaggtgattttttgtggttttagtttttggtagaagatttttgtttttggttattttattttttttttgattttttggtttagtggtggtggtgattttttgttgttgtttatttttgggttgatttattggtttttgtttggttttttagtttttttattatttatgtgatagatttttggtattgaagtttttttgttttaagtgtttagtagttttttttttttgtttagattttgatattttattaaggatgttttggattattagatttttttttatggtttgttgaggaaa

SEQ ID NO: 2849 - DNA, 2461 bp, Artificial Sequence
  chemically treated genomic DNA (Homo sapiens)
tttttttgataggttatggaggaagatttggtagtttaagatgtttttgatgaagtattagagtttaaataagaaaaagaaattattgaatatttaaaatagagggattttgatgttaggaatttgttatatgggtaatggaagagttgagaggttaaataagggttagtgagttaatttagagataaataatagtaggagattattattattgttaggttagagggttagaggagagatgggatgattaggagtaagggttttttgttagaagttaagattataggaggttatttttagggtttggatttatagaggagattagttgtttttgaagatattatttgagttagagaggagagggaaatagagatttttttagttttttttgtttttatttttttttttgttgttttttattttttattaatgttttttagtggattttagttgaagttatttgatttgggattttgggaaatagttttttgttggtaagatgaatgggttgtgggtggttaataatgaatgtgaatttgtttttgagtgtgtgtagttatttgaatagttaggggtggtagattttttttagttagagtaaagtttgtggttttgttgattagttgtgaaaaaaggagatggtttatatttagttgtttttgtttttttaggaggggttttatttgtttttttttagtaggttagttgggtagttgtaggaggatgggtagtggttattttagggtattttaggtttttgttgttaatattgttggtaagagatgttttttagttttaaggtaggattaggaaaggttgtgttaattttggagtttttttggtgtttgttgttttggagttatttttatattatatttttttatattatggtaatttatatattttagtagagtatatgagtgtttaaaatataaattaggaataataatatattattaggagttttgtagatattttaatttagagaaggttttggaaattagttgttaaaataagtggtttttttattttgagtgggagaatttttagtaatatttgataataagtggatgtgatgaggattataaagtattataatttttgttggattgtatattgaaagttgtatttagtgtgtggagtttattagagtaggtattgttgtgatgaatatgaagggattgtggaatgaattgttgttttattgttaagtgtttttgattttgtgtttttgttatttgtgttttttggaagatatatagaagtaaaggtttaaatgggggttggttataggttggtgaggagggtagttttttaggtaaggggagttttaaggaagatgagtgggagtataggtaggggttagaggagtgtaagaaaatttattgtttttgtatggttaagttttagatttatagaaatttaaatatataattagatgtaggatttttatatttatttaagtattaataattttatttttagaaatttaaatatttgtatttatatatggatatgtatgtatatatatatatatagatatgtatatatatttatttatttatttaataaatagtgagtgtttattttgtattagtgattatgttaagtatatggtttttgtttttttggagtttatttttagatatataatatatatatatatagatatatataggtatatatatatatatatatagatttatatgtagaaatatagagatatgtagatatatgtatgtatatatatagatatatatgtatatatataagtatataggttatatataaatatgtttaattagatatttatggtttttttttagttttatatttatatgtatatattttgtgtatatttataattaaaatgtaatattagttagagggaagaggatgaattaattaattatttagttgtgtttttattttgaaaatatggttgttttttaatttagaggttgttagtttaagattgttgtttttattaagagtttgatatgtttttagtttatttatttgatagttttatatttaatatttttaattgttaattttttaatttaggtttaaaatattgtagtaaggttaggtatgatgatttatgtttgtaattttaatattttgggaggttaaggggagaggattttttgagtttaggagtttaagattagttagggtaatatagtgagattttgtttgtataaaaaattaaaaaatttagttaagggtggtggtatatatttgtggttttagttatttgggaggttgaggtgggaggattgtttgggtttagaaagtggaggttatagtgagttgtgtttatattgttgtattttagtttgggtagtagagattttgttttataaaaataaaataaaatgatataatataaaatattgttgtgatatggtatttggtaatggaaatatagtttagagagtaattatttttgatggta

SEQ ID NO: 2850 - DNA, 2495 bp, Artificial Sequence
  chemically treated genomic DNA (Homo sapiens)
attatgttagaagggttagaaaattttgaaagtaattattagtttagtagaagttgtaagaggtttttatattatgaatagtttaattttgataaatagaatttgtttatttagtgattttaaatgtatttaatgatgttatgatagtagtggttataatagtattagtttttgatagtagtgtggatataggttttgagaattttatataatagttgattagataatgtgatattggtgtgaggatgtgtgatttagattattgttttagagtgatttagagttggttgtgaaattgtaaggaggtattaaggggtaggtattttagattttgagttatgtggaaagtgttgagttatatggaaagtgttgatatttaggggtgggtttgggtgtattatgaggttagtatttagttgttttttggatgtaataaagtttggatattaataatttaatgatttttgattttatgggagttagtggatttgttttatattatttttatgttaaattatggtttatataaggatgttatttagttagagatttatatttgaaaaaagattattttggaaatttttaaaaattaatatgtgatttggaaattgttttaatgttttataaatgttgaatattatgatttgtatgaatgattatgatgtttagttagtagagtattaaaaattttatttatgtttttgttagtgttgtaattttattaatattttttattattatggtaatgttttttaaagttgtttaagatttataataagttgtaaaaatagtgtaaaatttttgtgtattttttatttatttttttttattaataatattatatataattatagtatagtgttaaaatgaggaaattaatatagtattatattgttaatttgattatagaatttgtttagattttattaggatttatgtgtatttttgtgtgtatatgtatgtgtgtgtgtgtggtttatttttatttttaaggattgtttttttttataatttttatgttaaggttatggagttttagttattgttaggtagaggtggagttatatatgattgtgtttttatataattatattttttttatttaagaatatttattttatatggagaaatagattatgtttattaattattttagaaagtatgtaattttattagattaagttttgtttttgggtattgattaatagagggaatggttttttagtgatttagaatttttatgatatggtttgtggagattatattttggggttagttgtttaaatgtattgttggaattttaggtagaaatgtgtaatggtatgttaagggttgttgagttgttatagtttaagtagggttatttgtggtttttaaagagaggttgtaattttttatggtatttataaattttagtttttaagagttagggagaaaatgtaattatgttgtttgattgagttaattttttttttattttgttttttttttatttttattattattttatttttaattttgagtagtttgtatagttgttttagggtaaagaatatggtatgagatattatttttagtattattttagggttagataaaatggttaggtattttttttgatttaatgagggaaagttttagaaagttgttgataaagtagaaattttttaatttgaggttttgaatatttattgttttttttgagtaagatagaaaagttttatttattggttggggtatttttaatggtagttgtaggttagggatagttatgtttatatatgtatttttttattattgattaggtttattagaatgttagagttaaagaatattttttttttgttttgtaggtatatggagaagggttttttgttgttttttttgatataaatatagtgtttgaagtattttttttggtaatttttttgatttatttgtatgtgtatttatttattttatttattaggagagttaaatgagtgaaatggttataaatggtggttttggaattagatagatttgggttttaatattatttttaatatttattggttgtgtggtttttatattaggatagaaagtttatatgttgaatttttaatttttagtatttagaatgtgattttatttggagatagggtttttatagttgtgttttttatagttgtttttaagaatatttaagattggtgtttttaggaaggggtgatattggagataggtatatataggaagaatattataataatgtgaatttagagattggggtaatgtttttataagttaaggaatgttaaagattgtttaaaaattattggaagttaggaaagaggtttagaatagattttttttttattatttttatatggtgttaagttttttgattttgattttggatttttagtttttaggattgtgagaaaataaatttttgttgtttaagttattatttagtatgtggttttttgttatagtagttttagtaagttaat

SEQ ID NO: 2851 - DNA, 2495 bp, Artificial Sequence
  chemically treated genomic DNA (Homo sapiens)
attggtttgttaggattgttgtaataaagaattatatattaagtggtgatttaaataatagaaatttatttttttatagttttggaggttagaagtttaagattaaggttagagggtttggtattatgtgagggtagtaaggggaagatttgttttgggttttttttttagtttttagtgatttttggataatttttggtattttttggtttgtaaaagtattgttttaatttttgagtttgtgttattatggtgttttttttatatgtatttgtttttaatgttatttttttttaaggatattaattttaggtgtttttaggaataattgtaaagggtataattgtaaagattttatttttaaataaagttatattttaagtattggggattagaagtttaatatgtgaattttttattttaatatgaaggttatatagttaataagtgttagaggtagtattgaaatttaagtttgtttgattttagagttattatttgtaattattttatttatttgatttttttggtgaatgaaataagtgaatatatatataagtggattagagaagttgttagaaaagatattttaagtattgtgtttatgttaaaagggataataggaaatttttttttatgtgtttgtaaagtaaaggagagatattttttagttttggtattttaatgggtttgattaatgataagagagtatatgtgtagatatgattgtttttggtttatagttgttattaaaagtattttagttaataagtaaaatttttttgttttgtttagaaagaataatgaatgtttaggattttaaattagaaagtttttattttgttaataattttttgggatttttttttattgaattagaagggatgtttggttattttatttggttttgaggtaatgttaaaggtaatgttttatgttatgttttttgttttgggatagttatgtagattatttagggttgggggtagagtgatggtgggagtgggagaggggtaaggtggggaaagagttagtttggttaaatagtatggttgtattttttttttgatttttgaaggttgagatttgtggatattataaaaggttatagtttttttttggaagttataaataattttgtttggattatgatagtttagtagtttttggtatgttattatatatttttgtttggaattttagtagtgtatttgagtagttggttttaaagtatggtttttatagattgtgttgtaggggttttgggttgttggggagttgttttttttattagttaatgtttagagatagagtttgatttaatgaaattatatattttttggagtgattaataaatatggtttatttttttatatgggatgaatatttttaaatgaaaggaatgtgattatgtgggggtgtagttatgtatagttttatttttgtttagtaatggttaaaattttatgattttggtatagagattgtaaggaaagatagtttttaaaaatagaggtaaattatatatatatgtatatatgtatgtataagagtatatgtaagttttggtaaaatttggataaattttgtaattaagttaatagtatgatattatgttaatttttttattttgatattgtattgtggttatgtgtgatattattaatggaggaaggtgagtaaagggtatataggaattttgtattatttttgtaatttattatgagttttaaataattttaaaaagtattgttatagtaataaaaagtattagtgaaattataatattgataaaagtataggtagaatttttagtattttattaattgaatattataattatttatatgagttatgatgtttaatgtttatgaaatattagaataatttttaaattatatgttaatttttaaaaatttttggagtggtttttttttggatatgggtttttaattaaatgatgtttttatgtgagttatggtttgatatagaaatggtgtaaagtaggtttattgatttttatgaagttaagaattattaggttattgatgtttaggttttattgtatttagagggtagttgagtattgattttgtggtatatttaggtttatttttggatgttagtattttttatatgatttaatattttttatatgatttaggatttggagtgtttgttttttgatgtttttttgtaattttatagttaattttgggttattttaaagtagtggtttgggttatatatttttatattaatgttatattatttagttagttgttgtatggggtttttagaatttgtgtttatattgttgttaggaattgatattgttgtggttattattgttatgatattattagatatatttaggattattaaatagataagttttatttattaaaattaggttatttatggtgtagaagttttttgtagtttttgttgaattaataattatttttaaagttttttaatttttttaatatggt

SEQ ID NO: 2852 - DNA, 2425 bp, Artificial Sequence
  chemically treated genomic DNA (Homo sapiens)
atgtattttgagtgatttaggaaaattgtttttttttttttttttttaatttttaagtatttaaattaagttttttttttttgtaatgttttatttttggtgtttatgggagttgagaatatattattggagaatttttttagtttaaagatattagattaataaaataatttggatgttaattttgaagttagtttataataattagggtttttggtttaggtttataatgagtaggagatttttgttatttttagtgttatttttttgtaaaattttaataagttattttatgtgaaaatattaattattgtttattgtagtgtttaaaattagttaaggaagtttttttgaaggtggtgatgtaggggtttatataagggattagttgatggaaaggagaaagatgtgtgttttagagagaagaaataagttgggtagttttgtaaatggtttatgtttatgtggagatatgttaggttagagtaggtttgtgtgggagagaagttgtggttaggggtatggaattggatagagattaaaaatatgggttttagaaagttaaattggaggatttttattttgtaattttatttttttttttttttttttttttgaaattaattggatttattttttattttttttatgggagattttatagttattatttttatttttttaatagttttgggaggtataattatttttatttattagttaaggaaattaaggtttaggagggtttattgataggagtgggagtagtttgggtttatgttatgtgtttttatagttagtatatagttttatttgttttattttgtatttgttgtgttttattgtatttagattgtagttagttttttttttgtttttttgaattttagtataggtaggtattgtatttatttatttttatagatggtaaattgaggtttagagatgttaaattatttttttaatgttatattgttaggaagttgttaatatattattaaatttggggatatttgttttttagggtagtattttgttgttttttaatatttagtagttgtgattgttagatgatgatgatgattattaatagagttattgtttttggggtaatattagtagtgtagtagtgagtaggttagtagggtttagggtagtttgtttggttatatttgttttggagttgttgtttgttgtgtattaggaatttgttgaagtttgagagttgttagtatagattttattagggagttagtaatgttttttatttttttaggtttttttgaaatttagttaaggaataggtgttgagtttatagttagatagtttttggagtttttggttttgggtatggtgttttagttggtggagatggaaatagtaaggtttttttgatttaaagattttttattgtttttgatattttagatttaaaatttattattattgttatttagtatttattttgttaggtatgatgtagggagagaggaggggataaaaaagggaagggttgtatagagttagggtagagggaggaattgagttggagaaagtattaaggatttatttgtgaaaattttttggagtgttgaggttaaaagtttatttgggtgggattaaaggggagtttttaatatagtttatgattggaggattagtaatttgtaggtttagttaggttttgattttttttttttttagtttttgaggagaattatagttattgtttgagaaaatgtagttttaggatataggattttaatttagtgtttgtatagttttttaattagaggtttgtaaatggtagagttgtttatttggattattttgtaaattgtgaggttaaattgtattaataaaaaaaagtattttttttttaatttttttttttttttagttttttattagattgggatgagatgtagaaatgtattagattgggaaatatatttaattttttgttaagtttttttttaaataataagtttaatttttggtaggtaagggtgttttggtaaaatttaaatagaattgtttagtttttattatatttattttgatagtgaattttttagaataggaagtattttttgtttaaagtttttgtttagattttatatatgaagtttttaaaagtaaaaggaaattatagtttagttttttgtagatattttgaatattttgaggagaggtagggataattggaggtagggaaatggggttttggatgataagttttagttttgggaaagttttggaggtggtaggatagttaggttagagttgtttggtggagatttggtttttgaagttagtggggtatttttgagtagtaggttttttttagagtaaatattagttttttttttttttgtttttaatgattatagttgggtaggggggagaggttttaatttttaa

SEQ ID NO: 2853 - DNA, 2425 bp, Artificial Sequence
  chemically treated genomic DNA (Homo sapiens)
ttgggagttaaagttttttttttttatttagttgtggttattaaggataaagaggagagagattgatgtttgttttgagaaaggtttgttgtttaggggtgttttgttggttttaggagttaagtttttattggataattttggtttggttgttttgttatttttagaatttttttagagttgaggtttgttatttgagattttgtttttttatttttggttgtttttgtttttttttaagatgtttagagtatttgtaaagggttgagttgtgatttttttttgtttttaaaaattttatgtataggatttaaatagaaattttagataagaaatattttttattttaaaggatttattgttaaaatgagtataatggaaattaggtaattttatttaggttttattaagatatttttgtttattagagattgggtttgttgtttaaaagggagtttagtaaaggattaggtgtgttttttaatttgatgtatttttgtattttattttaatttgatgagaaattgaaagagaaagagaattaaaaggggaatgtttttttttattaatgtaatttgattttataatttgtagaatgatttagatggatgattttattatttgtaggtttttggttggaaggttgtgtaggtattgaattagaattttgtgttttgaggttgtatttttttaggtagtgattgtagttttttttaaaagttgagaaaaagggaaattaaggtttaattaggtttgtaagttgttgattttttagttatgggttgtgttgggggtttttttttgattttatttagatgggtttttagttttagtattttaaaggatttttataagtgggtttttaatgttttttttagtttggtttttttttttgttttggttttgtatggttttttttttttttatttttttttttttttttgtattatgtttggtagggtggatgttgaatgatagtgatggtgggttttaagtttgaggtgttaggggtaatgaggagtttttgagttagaagggttttgttgtttttatttttattagttagggtattgtgtttagggttggaggttttgggagttatttgattgtgagtttagtgtttgttttttggttggattttagagaggtttgaggaagtgaggggtgttgttggttttttggtggaatttgtgttgatagtttttaggttttggtgggtttttggtgtatagtagatagtagttttagggtagatgtggttgagtaagttgttttgggttttgttagtttgtttgttgttgtattgttagtgttgttttaaaagtaataattttattaataattattattattatttaataattatagttattgggtattgggaggtaatggagtgttgttttgaagagtagatgtttttaggtttagtaatgtgttggtgattttttagtaatgtgatattggaggagtggtttaatatttttgagttttggtttgttatttataagaatgggtaagtgtagtatttatttgtgttgaaatttaaagagatagagagaaagttggttgtaatttaaatgtagtaagatatagtaggtgtaggataggatagatgaagttatgtgttgattatgaagatatgtgatatgagtttaagttgtttttgtttttgttagtgaatttttttaagttttagtttttttagttagtaaatggggataattatattttttaaagttattgagaaaatggaaataatagttgtgaaattttttatgaggagaataagaaataagtttggttaattttgaagaaaaaaagagaggaaagggtggagttgtaggatgaaagttttttaatttgattttttaggatttatgtttttggtttttgtttaattttatgtttttaattataattttttttttatatagatttgttttaatttggtgtgtttttatatgggtataaattatttgtaaaattatttagtttgttttttttttttggaatgtgtattttttttttttttattagttgattttttatataaatttttatgttattatttttaaagaggtttttttgattgattttgaatgttgtaatgagtagtgattaatatttttatataaaatagtttgttgaggttttataaagaggtagtattggaggtggtagaggttttttgtttattgtgaatttgagttagaagttttgattattgtaggttggttttagggttaatatttagattgttttgttgatttggtgtttttgaattgaggaaattttttaatggtgtgtttttaatttttatgaatattagagataaaatgttgtaagaggaggaggtttagtttaggtatttagagattgaggagaagagaaagaaggtaatttttttggattatttaggatgtat

SEQ ID NO: 2854 - DNA, 2488 bp, Artificial Sequence
  chemically treated genomic DNA (Homo sapiens)
tttttttttttttgagatggagttttgtttttgttgtttaggttagagtgtaatggtgtgattttggtttattgtaatttttgttttttgagtttaagtgatttttttgttttagttttttatgtagttgagattataggtatgaattattattatatttggttaattttgtatttttagtagagattgggtttttttttgttggttaggttggtttggaattttagattttaggtgatttttttgttttttttttttagagtgttgggattataagtgtgagttattgtgtttggttgaattattggttttttttaagtagtggaataataatggtttataatatttagaagatggggttatatatttattagatttatttttttagagtttattttagtatttgatatagggtagattttaataattgttgttaattaataaatatatatttttaaatatattgttagtaatgtggaagatatattgaagaaggaaaagattagtggtaagatataagttaggtggtaaaatttaaaagaaaagttagtgatagaaaagaagtttgttgagaatgatggtttttagttttatttatgttttatgtatatatatgtaataaattagtatattgtgtatatgtagtttagaatttaaagtataataaataaatatgtgtgtgtgtgtatatatatatatatatatatatatatataaagaagttgatatgggagagatatttgaggtagaattgataggttttggagatagtatgattgtgtggttttagagagagatattagttgagaataatttttaaaatttttatttgtgtgtgattttttatgggggatatagaagggggagtttagttggggattttgagttttagttgtttttggaatatgattgtatagattgtggtttgaaaggaagtggtagagaagaaaaatttaaaatggttgttaatagtttgttttttggaggttttagagttttgggggttatggatgtatggttatgtagggtgagtaattgtgatgagagaatagaaaggaaatttaaataagagaatttaaagtagagatgagttaaaaattagtaatatgaattattataagtgggtagttatgtttggtaggagatttaggtaaagtgagggtaaattttttagtttttttttgtggaaaatttataaagtttagattggagaaaatgtattgatagttttgaagttggtattttaagttggaatgtttttttaaagtagtatataatggtataatttaataattttgattattgtggaaaaatgttatgtgttaatagtgattttttataattttgtttagaaaatttgaaagaaatgtaaaaaatggatttgtagttttggtagtaggtagagaaatagtagtagagggttgtaggttagtaattgatgttttaaatattattgagtgttttgtttgtaattttaggggagaatgataataattaaaagtataaatttataagttatttttgaggaggaaaatgttgaatgtatttaaagtgaagggggtttgttgaaatgtttaagtttttttagtgagtttttagatatgtaatgattagttttatgtttatagagtgattttttttttaaatgttttaaagtgttataaaatggaatagattattaatttatgagattttttgggagttagtgatgaaattataattatatgatatttttatatgtttagattttatttgattgtattggtttttgttataaatagtatagtatattgtttaaaaggatgaaatgaaatttttttttttttttttaattgatttggggttttattatgaggtagatttgagtttgagtttgtatttattttttttagtgttgtgattttaggtaggttattttatttttttttatttttatttttttatttgaaaaatagatagaataatagtatttaatattttatagggtgaatattgaggattatttgagagtaaaataattaatataattttttatttataatttatgtttaataaatattagttattattgatattattattattgttaaaatgataaaggtatattatttttataattatttatttttgttgatagaatgtaaatttggttatagattgtttaaatttttttgatattttaaaataaataaataaataaattagttagagatttaattgagtagtataatttttttttgaaaggaattttttatggttaaataaatttagggattgagttttttatattttagattttattatttattgtattataggttttggtatgtagtgagtattttataaatgtggagtatatatattgttgaatgggtaaatagttttattttttttgagaagtaaggatttttggttttttattattttttgatgattaatattatgtttgtgtttatataagttagttgtgatatttggatttttttta

SEQ ID NO: 2855 - DNA, 2488 bp, Artificial Sequence
  chemically treated genomic DNA (Homo sapiens)
tgaaaaaaatttagatgttatagttaatttgtgtgggtataagtataatattagttattagaaagtggtgagggattagaggtttttattttttaggagggataaaattgtttatttatttagtaatatatgtgttttatatttatagagtgtttattgtatgttagggtttgtaatataatgggtaatagggtttgggatatggaaaatttagtttttgaatttgtttaattatgggggattttttttaggaaagggttatgttgtttagttgaatttttggttggtttgtttgtttgtttgttttaaaatattaggaaaatttagataatttgtggttaaatttatattttgttagtaaaaataaataattataaaaatagtgtgtttttgttattttagtagtaataataatattaataatagttaatatttattgagtgtagattataagtgggaaattatattgattgttttatttttaggtaatttttaatatttattttatgagatgttaagtgttattgttttatttattttttagatgaaaaaatggaagtggagaggaatagagtgatttgtttaaggttatagtattaaaaagggtggatgtagatttaagtttaaatttgttttgtagtaaagttttaagttagttgggagaaggaggaaaggttttattttatttttttaaatagtgtattgtgttgtttgtaataaaggttggtataattaagtaaggtttgaatatgtgggaatgttatatggttatagttttattattggtttttagggaattttatgggttaataatttattttattttgtggtattttggaatatttgaggagaaagttattttgtgaatataaaattaattattgtatatttgaaagtttgttggaaaaatttaagtattttaataaattttttttattttaagtgtatttagtatttttttttttagaaatgatttgtaagtttgtgtttttaattattattatttttttttgaaattataggtaaagtatttagtgatatttgaaatattaattattggtttgtagttttttgttattgtttttttgtttgttgttagggttgtaaatttattttttgtattttttttagattttttgaataaaattatggaaaattgttgttggtatatggtatttttttataatggttagagttattgaattgtgttgttatgtgttattttgagaagatattttaatttaaaatgttagttttaaaattattagtatgttttttttaatttgagttttataaattttttataggaaaaggttaagaagtttgtttttgttttgtttggattttttgttgagtgtaattatttatttgtgatggtttgtgttgttgatttttagtttatttttgttttgagtttttttatttggattttttttttgtttttttattataattgtttattttgtgtggttatgtatttatggtttttggaattttgaggtttttagagggtaaattattggtagttattttgaattttttttttttgttatttttttttaggttgtgatttgtgtagttatgttttaaaggtaattggaatttaaaatttttgattagatttttttttttgtattttttatggaggattatatataaataggaattttgggagttgtttttaattagtgtttttttttgagattatatagttatgttgtttttaagatttgttaattttattttaaatgttttttttatattaatttttttgtgtgtgtgtgtgtgtatatatatatatatatatatatatatatttatttattatattttaagttttaggttatatgtgtataatgtattggtttgttatatatgtatatatgggatatggatgaagttggaaattattatttttagtaaattttttttttattattgattttttttttagattttattatttggtttatattttgttattagttttttttttttttagtgtattttttatattgttgataatgtatttaaaaatatatatttattagttgataatagttattaaaatttattttgtattagatattgaaataggttttagggaaatagatttggtgagtgtataattttattttttaaatgttatgaattattgttattttattgtttagaaagagttaatggtttggttaggtgtggtggtttatgtttgtaattttagtattttgggaggaggaggtgggaggattatttgaggtttggagttttagattaatttaattaatagggagaaatttagtttttattaaaaatataaaattagttgggtgtggtggtggtttatgtttgtaattttagttatgtgggaggttgaggtaggagaattatttgaatttgggaggtggaggttgtagtgagttgagattgtgttattgtattttagtttgggtgataagagtgaaattttgttttaaaaagaaaaaag

SEQ ID NO: 2856 - DNA, 2378 bp, Artificial Sequence
  chemically treated genomic DNA (Homo sapiens)
ttgaagttatagtttaggttttgatttttattggtagtgaaattttattttgatttttgtgttttttattttgtaaaatgaaggtgggaatagtttgttgagtgattgttgtggggattagatgatatttgtggaagaattttgtaaggggtaaagaggtattattttataaggtaatgttattatttttaaggtggggtaagtgatagttagatatttaagttagagtaaagttaggagaaggttgtattggtatggaaaggggtaaatagtttatttttattagtttttttggagggttaattttaaagttattagagttttaagttttgggtaaaaaatgtttgtttttagagtaattttttatttttttagagttattatgtttaaggtgttttgttttgtttgtttgttttggttttggtttttgttttattttgtttttttgagatagagttttgttttgttatttaggttggagtgtagtggtgtaattttggtttattgtaagttttgttttttgggtttatattatttttttgttttagttatttgagtagttgggattataggtgtttattattatgtttggttaatttttttgtatttttttagtagagatggagttttattatgttggttaggatggttttaattttttgaatttgtggtgtttttattttgaaaaagggaaaaatatgttttatgttttgaggtttaattataaaatatttttattttttaagtttgattaggagttatttgttttagaatgatttggagtgttgtttaaatgtagatttttaggttttatttttgattattatttaatttttttgagttttagtttttgagttttgaggtgtgatgtaatttttgttttaaattttagtaagagagttttaatagaaaaaaatgaataaatgaaaagatgaatggtttgtaagggagaggtagaatatgtatttagataagatgatttttattgttttatttaaattagatttttattattttaggtttttaaagatgtttttagttttaaataattaatagagtggttttatttttatttattgtgtattttggttaagtgtatagtaagtggattttttggttgggtattttgttaatgttggagttgttaggaaataagaatgtgtgtatttattgaagaaaataaaaatgtttatgtgatgttgtatagagatgatttatgagattttatgaatgtgttattaaaagatttatttagttattgttaatgttaggtttgtaaatatttgggggtttaggtaataaagttttttgatggagttagtgggtaggatgtgtttgtggaggggagtatgagttttgtgttgtaggtgtttgtatttgtgagttgtgtggagttaagtatatttaaattataagtgtatatatgggtgtaaataaatgtatatatattagtggtgtgtaagggagtatgtatatatgtggattttatgagattgtatagtatgggttatttttggtgtgattaggaagagaggttaagttatagtgtagaagtggatttattatttatattatttttaaaggatatagagtttttgttgtttaaaggaaggggttagttattatttattgttaagattaaaagttttggggtattaagaaaagtagattattaagagaaaaatgtttttagttgagtatgtaagaatggatagagtttgattaataggaggaagagtagggttttattttgtttattttttttgttgggtttgaattttttattgatattatagtttattagttttaggtttttgaagtttttttgagttttgtgaattaggtttatgttttattgtttttttgggagtattgttttgtgttttttagttgttaggttggtgtaaattatagaatgaataagtttttttattaagttttttggagtttagagtagtttattgttttttgagggttattttttatgggagaaagtttaagaaaatgtatagaaggtatgttattaaaagaaaagggaagaggaagagaaaaggaggaaggagaaggaggagaaggaaaaggaaagtaagaaagaagtgtttttagggtgagtttttgaattatttagagtttatttttataaaaatagttttaagattttttgtgggttatgtaagaaggaggggtgtttatttttttttttttttttatttttttgtaataaggagagaattataggttttgtaagagttttttgtttgtttggggtatgttattattatatgtatttttttaggtatgtgagggaggttatttttttatgagatagggaggaattttgggtaattgtggtttggaaatgaaattagtttttttaa

SEQ ID NO: 2857 - DNA, 2378 bp, Artificial Sequence
  chemically treated genomic DNA (Homo sapiens)
ttgaaagggttggttttatttttaagttatagttgtttagggtttttttttgttttgtagggaagtgattttttttatgtgtttgagaagatgtatgtgatgatggtgtgttttaggtaaataaagggtttttgtaaaatttatgattttttttttgttgtagaggaatgaaagggagggaggaagtaggtattttttttttttgtatggtttataaggggttttaaggttatttttatgaagatggattttgggtgatttagggatttattttaaaagtattttttttttgtttttttttttttttttttttttttttttttttttttttttttttttttttttttttttttaataatatattttttatgtatttttttgaatttttttttatagaaggtaatttttagaaaatagtgaattattttaggttttaaggggtttagtaggagagtttgtttattttgtggtttgtattagtttggtagttggagagtataagataatgtttttaggagggtggtaaggtataaatttggtttatagaatttagagaggttttagagatttggaattaataggttataatgttaatgagaagtttaggtttagtagaggaggtgagtaagatgggattttgtttttttttttattggttagattttatttatttttgtatgtttggttagagatattttttttttgataatttgttttttttgatgttttaaggtttttggttttagtagtaggtgatgattaatttttttttttgagtagtgagaattttgtgttttttgaaggtagtgtgagtaatgggtttatttttgtattgtggtttagtttttttttttagttatattaggagtggtttatgttatgtgattttatggggtttatatatatgtatatttttttgtatattattagtgtgtgtatatttatttatatttatatatatatttatgatttaagtgtatttggttttatataatttataggtgtaggtatttgtagtatagggtttatatttttttttataagtatgttttgtttattgattttattagggagttttgttgtttgagtttttaggtgtttgtagatttaatattggtagtgattgagtgggttttttggtgatatatttataaaattttataaattgtttttgtgtaatgttgtatgaatatttttattttttttaataaatatatatatttttattttttaatagttttagtattggtagaatgtttggttaagaggtttatttattgtgtatttggttaggatgtatagtggataggaatggggttattttgttggttgtttgagattgaagatatttttggggatttgggataatggaggtttgatttggatgggataataggagttattttgtttggatatatattttattttttttttgtaagttatttatttttttatttgtttatttttttttattgaaatttttttattgaggtttaaagtaaaagttatgttatgttttaaaatttaaaaattgaggtttagaaaaattaagtgatagttaaggatggggtttgaggatttgtatttgaatgatattttaggttattttgaggtaagtggtttttggttagatttgaagagtgaaggtattttgtgattagattttagggtataaaatgtattttttttttttttaaaataaaaatattatgagtttaggagattgagattattttggttaatatggtggaattttgtttttattaaaaaaatataaaaaaattagttgagtgtggtggtgggtgtttgtagttttagttatttgggtggttgaggtaggagaatggtgtgaatttgggaggtagagtttgtagtgagttgagattgtattattgtattttagtttgggtgatagagtaagattttgttttagaaaaataaaatgaagtaaaaattaaaattaaaataaataaatagaataaaatattttggatataataattttgaagaagtgaggagttattttaaggataaatattttttatttaaaatttaaaattttaataattttggagttgattttttagagaggttggtggaggtgggttatttatttttttttatgttagtgtaatttttttttggttttgttttaatttgagtgtttgattgttatttgttttattttaaaaatgatgatattattttataaggtgatatttttttattttttataaagtttttttataaatattatttaatttttataatagttatttagtgagttgtttttatttttattttatagagtgggaagtataggggttaaggtgaagttttattattagtaagggttagagtttggattatgattttag

SEQ ID NO: 2858 - DNA, 2432 bp, Artificial Sequence
  chemically treated genomic DNA (Homo sapiens)
gatttttttatttgtgagtttttgaagaattttgtatataatgttaatatggtgttggttatattttattttgatttttattgtgtttatgttttttattagattgtgagttttttgaggataaggatttggttttatttatttttatttttaggtttattttaatttggaatggagtaggtgtttaataaatatttattgaaatggatattaaatttgaataagttttgaggatttttaagttttttagggttggagagaggaattattaaattttttttgatatttgggatatatatatagtttataataattaaaataattaaatttggatgatttaggatatttgagtttttttttttatattttttattattttggtaaattttttaatttttttaagttttaatagttttatttgttattttgaagtaatttatgtgttggttagggttaggtatgtttagaaatgttatttgttttagtttttataataattaaggtatatgagtatttgatttttattttatagatgagaaaaatggaggtttagagagattgagtaatttttttattttatatagttagtaagtagtagagttgggattagattaggttttttaatttagagatattatttatttatttattgttttttttagaaaaatttttattgagtatttattgtattgttggtatagttttagatgttaggggtatagtagtgattaaggtaagtgattaaagtgtttttatatttatggtatttatattttttttttgttatgtatttttttaaagttggtgatataatatgagaggggtaataggattgtagtggttttaataaggtttagtatatatagtagttttagaatgagagtagtaagattaattagttaatgttaatttttattataggtggagatggagtttgatgtgaagttatgttttgtttgtttaggatagggtaggttgaagttttttagtatttgtggttgggttgggttaggatagagaggggagaggtaatttggaagttgtaggttataagtttttttttttgttattttgtgttttttttttagttttgtttttagttaagtataggagtagttgtttaagtttatgatgtgttgtgtgtaggttgtagatttattattatttataataggttgttgtttttattttttatttatagaggtggttgagttattatttatggttattgtagttgttaaattgttttgggggttgagatttatatagtagttatgtgagttgttataaatttggggttgggaggaggatgtttttaattgaattagagttgatgattgatagatagggatagtagagattagttttattaattttaaaaagtttaggaagtttttatttagaatgtattttttggagataatagtggtggagtttaggttatgtatgagataaagaaaaaggtttagaataagtgggtgtatatttgtattttggaatagttaggaagatttgggagtgggaattagaggatggatttttattttttttttttatgatattaaatttgtgtagtaattatgttttttatttgaatagtggtttttaataattagttaataatgggatataatttttatagtttttaattttaagattttaaaatatattatgaataattaaatgttattatttagtgatttgggtaattaaagatttttttaattgttatttttttttttttgttgtgtttagaatatagtttagtattatgtttttaaatgaggaaattgaggtatagagaggttaggtgaattggtatagattatttgatattttattgtggtttttagtttttattttatattttttttttagggtttttagtattgtgtttttgtatgattgattgtttttttttttttagttttaaattttatttttatttttatttattttagatattattatttaaatgttttttgttgaaattatttttatttttattggggtaggtgtagggatttagtaggataaattggttatttttttttttggttttattttggttttttttttattatttaaattttttattttgaataaagtagtaaaatgtatttttttttttatgtggtttagtataaggataggtttggatttttataatgaaagtttatgtttttaataagtgtttatagttagtgttttttgtatttatttaattgttgttttttgaaagttattattttttattttttgtgattaatgtgtattgggagttaaatttatatgtgtgtgtaggattttatttttaaagatatgttttattattgtttattgatagggtttttaattttaagttaggatttatgtatgttagaggttgtggtgagttatgagtattgtgtttatttatgtatgggtataaa

SEQ ID NO: 2859 - DNA, 2432 bp, Artificial Sequence
  chemically treated genomic DNA (Homo sapiens)
tttatgtttatgtatgagtaaatgtaatgtttgtggtttgttatagtttttggtatgtgtgggttttggtttggggttgagagttttgttaatggatgatgatgaaatatgtttttggaagtagggttttgtatatatgtgtgaatttagtttttagtgtatattagttataggaaatagaaaatgatagtttttaggaggtaatagttaaatggatgtagagggtattggttgtggatatttgttagaaatatgaatttttattgtagggatttaaatttgtttttatattaaattgtatgagaaggggggtatattttgttattttgtttagggtggaggatttaaatggtaagagaggggttaaggtgaggttaggaagggaggtggttaatttgttttgttggatttttgtatttgttttagtgggaatgagggtgattttaataggaaatatttaaataatggtgtttaggatgggtaaaggtgggggtgggatttggggttggggagaagggggtagttagttatgtagaggtatagtgttgaaggttttggagaaagagtgtggagtggggattaagagttatgatgaggtattagatgatttgtgttagtttatttggtttttttgtgttttagtttttttatttgagaatatggtgttgagttgtgttttgggtatagtaaaagaaaaaaaatgatagttaaaaaggtttttgattatttaaattattaaataatggtatttaattatttataatatgttttgagattttgggattgaaagttatggagattatattttgttattagttggttgttaggaattattgtttaggtaaaagatataattattatgtgaatttgatattatgggggaaaggagtagaggtttattttttaatttttatttttaggtttttttagttattttagggtgtgaatgtgtatttatttgttttgagtttttttttttattttatgtatggtttgggttttattattgttatttttagggagtgtattttgggtgagggttttttgggttttttggagttgatgaggttggtttttgttgtttttgtttattaattattagttttaatttgattgaaaatattttttttttaattttaagtttgtggtagtttatatggttgttatgtaaattttagtttttggagtagtttaatggttgtggtgattataggtggtaatttagttatttttataaatggaaagtaaaaataataatttattatggatgatggtaggtttgtaatttgtatgtagtatattgtaaatttgagtgattgtttttgtgtttggttgaggataggattggggagggggtataaagtggtaggagaggagatttgtgatttgtagtttttaggttgttttttttttttttgttttggtttagtttaattataggtgttaaagaattttaatttgttttgttttgagtaagtaggatgtggttttatattaggttttatttttatttgtggtgggggttagtgttggttggttagttttgttgtttttattttaaagttgttgtgtatgttggattttattggggttattgtagttttgttgttttttttatgttgtgttattagttttgggggggtgtatgatagaaggaaagtgtaaatgttataaatatggggatattttaattatttgttttagttattgttgtatttttagtatttagagttgtgttaataatatagtgggtgtttaataaagatttttttgagaggagtggtaaatgaataagtaatgtttttgggttgaggggtttggtttgattttagttttgttgtttattagttgtgtaaagtgggaaagttatttaatttttttgaatttttgttttttttatttataaagtggaaattaagtgtttatgtattttgattgttgtgagggttaaaatagatggtgtttttaaatatatttagttttggttggtatatgagttattttagagtgataaatgaggttattgaggtttagagaggttaaggggtttgttaaagtggtggaaaatgtaggagggaaagtttaggtgttttgagttatttagatttagttattttaattgttgtgaattatgtgtatgttttagatattagagggaatttggtggtttttttttttagttttgagggatttgggagtttttagaatttatttaggtttgatgtttattttagtaagtgtttattaagtatttattttattttaaattggggtgaatttaggagtaagggtggataaaattaagtttttgtttttaaagagtttatagtttggtggagaatataggtatagtggaaattagaatagaatatgattagtattatattggtattatatatagagttttttagaaatttataggtgggagagtt

SEQ ID NO: 2860 - DNA, 2475 bp, Artificial Sequence
  chemically treated genomic DNA (Homo sapiens)
tggagagtatagtggttttttttaggaagttattttgatttttatttagatttttttttttgtgttaggtattgtgttttttttatagttttttttatagggtttttttttgatataattggtatttgatgtttttgtttttttgaaaataaggaaatagagggttagggaagtaattggtatttagtgttgttagggttttgttttttgtagatgaggagataaagggttagggaggtagtgggatggatatgttgaggttgttaggaaaagatagtttgatgtgtatttggagttgtttttgaaggttttatagaatttggtatagtgttaggtaatttggttgttttttttgttatatttattaattttagagtttatattttggtatagaaggaagagatttaggttggtgttgggttgtaatattttagggaaaggggtaaggagttttgatttgtttttatatttgtttgtttttaaattgggttggattttggttgggtggttgttgggtggtagttttgttttaggatatttggtagtaggataaggtgggggagttagttgttttgtgagttttttttaggattatttttttttgttttgttgagtagagatatagttttttgaggtttgagtttttattttttattatttttatttttgtttttggtatagaaaagttttagtattattttgttgaatgtggtattgagtgtatgggtgaggtatttttttaagtaatttattatagtaattttttaaatgtttatatagttttttgagaaggggattattattattgtttgtttatagatgaggaaatggaggtttagagaggttaagtgatttattggaagttatatagttggagttaggatttgaatttaggttttttagttttagtgtgtatatttttgtttatatgtttttgtttttagggtagtagtgagtttgaaatatgtgtagtgtttggtaggtagtaggtgtttttttaagttttttttttgttttatttagttttgaggttagtggtttgttttgttttgtgtttgggaggaatgtttgtggtggttttagtttggatttgagaagaaaggtagttttgtgggtgaaaggtgagtggttgggtgggtgtgggtgtgtttatttagggttggtgtgtggtttggggtggtgttgttgttagttgtgttggttgttttaggtttgtgttggtttttagatgtgagttggttttagttggttgggtttttttattttatgtatagaggggttttattaaaagtggttgtgaggaggtttaggaggttgtttggttttagtttgttggttttgagttttgggtttgtagaagttaggttagttgtatttgtgtttttgtgttttggtttttgtgtgttttatggtttagtttttttgttttttttgagttttttgggggtttaggtgagggatagtttttttgttaggaaattgaagttgtaggagtagtttgggaggggtaataatgttagaatttttttgtagtgtttatttttttgtattttaggggggtagaggtaatttatatggaataaaagtgtaaaatttattaaaatttagagagtgtttagtgagatattaaagtgtagatatttgtgggaaggagaaattgtagatttagagagttagtttttagtggggaggagagtaattggggttggggggtttgtaggggttatgttttttttgtggtatttttttttttaggtgggggtgggggtgttatttttttttttttttttttttggagataggattttgttttgttatttaggttggagtgtagtggtgttattgttggtttattgtagtttttgatttattgggttttagtagtttttttattttagttttgtgagtggttgggattttgggtatgtattattatgtttagataattttttaaaaatagagatagggttttgttatgttgtttaggttggttttgaatttttgagtttaagtaatttttttgttttggttttttaaagtgttaggattataggtgggagttattatgtttggtttttagggatgttattttgtatattttatttagtggtttgaattattttgtaataataaattataataattgggaaaaaaaatagagaaaaaatttgagatatttatttgtttttgatttttagttttatttttgttaaaaatggtttttaatgttttttagagattgtttgaatatttataagaaaatttatatatattttttgtttttttttgtttttggttttataaatagtattaaaatatagtttgagtatagtggtttatgtttataaatttagtattttgggaggttaaggtggatggattttttgaggttaggagtttgagattagtttggttaatatggtgaaaatttatttttattaaaaatgtaaaaattagttgggtatggtggtgagt

SEQ ID NO: 2861 - DNA, 2475 bp, Artificial Sequence
  chemically treated genomic DNA (Homo sapiens)
gtttattattatgtttgattaatttttgtatttttagtagagatgggtttttattatgttggttaggttggttttaaatttttgattttaggggatttgtttattttggttttttaaagtgttgggtttataggtgtgagttattgtgtttagattatattttgatattatttataaaattaaaaataaaagaggatagagaatgtatgtggatttttttgtgggtgtttagataatttttagaaagtattagaagttatttttaataggagtagggttgagggttgggagtaggtggatgttttaggttttttttttgtttttttttttagttattatgatttattattataaaatagtttaggttattgaataaaatatatagaatagtatttttggaggttaggtgtggtggtttttgtttgtaattttagtattttgggaggttaaggtaggaggattgtttgaatttaggagtttaagattagtttgggtaatatggtaaaattttgtttttatttttaaaaaattatttgggtgtggtggtgtgtgtttggagttttagttatttgtgaggttgaggtgggaggattgttggagtttagtaggttaagggttgtagtgagttagtgatggtgttattgtattttagtttggatgataaagtgagattttgtttttaaagaagaaaaagaaaaagaataatatttttatttttatttaaaaaagaaaatattgtagagaaaatatagtttttgtaaattttttaattttagttatttttttttttgttaagaattggttttttgaatttgtaattttttttttttatgagtgtttatattttgatgttttattgagtattttttgaattttgatgaattttgtatttttgttttgtgtgggttatttttatttttttggaatgtagaaaaataaatgttgtaggagggttttggtattgttattttttttggattgtttttgtagttttagttttttggtaaaggggttgttttttgtttgggtttttaggggatttgaggagaatagaggagttgggttgtggagtatatgaagattagggtataagagtataagtgtgattggtttggtttttgtaggtttggggtttagagttagtaggttggagttaggtggttttttgggtttttttatagttgtttttgataaagtttttttgtgtgtggggtgggggggtttggttggttggagttagtttatatttggaggttagtataggtttggggtagttggtgtggttgatagtggtgttattttgagttatatgttggttttggataaatatgtttgtgtttatttagttgtttattttttgtttataaggttgtttttttttttggatttaggttggggttattatgaatattttttttaggtatagggtagaatgggttgttgattttaaggttgagtgaagtaaaagaagggtttggaaaagtatttattatttgttaggtattgtatgtattttaggtttattgttattttgggagtagagatatgtgggtaagaatgtgtatgttggagttaggagatttgagtttaaattttagttttagttgtgtgatttttagtaagttatttaatttttttgagtttttatttttttatttgtgaatgggtaataataatagttttttttttagagggttatgtaaatatttaaaaagttattgtagtaagttgtttggaggagtgttttatttatgtatttaatattatatttgataaagtgatattgaggtttttttgtgttaggaatgaggataaagatggtgaaaaatggggatttaggttttggggagttgtgtttttgtttagtggagtaggaagggatggttttgaggggaatttatagagtaattggtttttttattttgttttgttgttgggtgttttgggataaggttattatttagtggttatttagttaggatttagtttagtttggagataggtaggtatgggagtaggttaaggttttttatttttttttttgggatattatgatttagtattagtttggattttttttttttgtgttaaggtgtgggttttggggttggtgggtgtggtaggagaggtagttgggttatttgatgttgtgttaggttttgtgagatttttagagatagttttaggtgtatattaggttgtttttttttggtgattttaatatatttattttattgtttttttggttttttgtttttttatttgtaaggggtggggttttaatagtattaggtattagttatttttttgattttttgtttttttgtttttaaaaggataagagtgttaggtgttagttgtgttgaggagagattttgtgagagaggttgtgggaaaagtatagtgtttggtataaagggagaggtttgagtaaaagttaaggtggttttttggaggaggttattgtgttttttg

SEQ ID NO: 2862 - DNA, 2456 bp, Artificial Sequence
  chemically treated genomic DNA (Homo sapiens)
tatttgtatataatgtaagatatggatataatatgtagtgttagtttgtatttttttatttgaatattttatataaattattatagataggataaaaaagatatatatttatttaaatgattttttagtttttattttaaaagtagaagatatgtatttaagtagtatatgttatagtgtttttttttttaaattatttgtttttagtttttagggattttgttttgttatgttttattttattgtttaagaaattaagattttgttagtaagagggttaatatgataaattattgatgatttttagtatggagttaagaagtttgtttttttgattagatttttagttggaaagatatttatattttgtttagtttaatatttgttaagtgagaatataaaatttaaagatgttttgttatattttagatttgtattaatgtttataaatattaaagatttatatgatatatatttaggaaatatatgttattttgttattgtttgaatttttaggaaataatgtttttattggtgttttgaattgttattattttttgttattttgaagataattaatatgtatttatttgtgtttaattttagttttagattatggtattggtgtgtgagaaataattggtttaattaattataagtaatatattaattttgtttttttttttttttttttgagatggagttttattttgttgtttaggttggagtgtagtggtatagttttagtttattgtgatttttatttttggggtttaatttttttagatatttttgttttagttttttgagtagttgggattataggtgtttattattttatttagttaatttttgtatttttagtagagatagggttttattatgttggttaggttggtttttaatttttgattttgtgatttgtttgttttagttttttaaagttttgggattataggtgtgagttattgtgtttagtttaattttgtttttataggtattggtttttattttttagttattggtttttttttttttgtaatttaggtttgtaatataattttttagttttttaaggaaaatagaattaaagatttttaatagaagattttagtttattaatatagttaatagttattaaagttatttaggtattggtttaataaaaaattaaagggttgtagtaagtgattagatttttattatttatttttgtgagatgggttttagagggttttgtttttgttgatattaattatttttattggtagtttgttaatatataagtagtttatagtagaatattgtagattgtagggtatttttaggttatatagttttaagtttttagaataggaattgaggtttggaagaaggttagtgtagtgtatttagtgaatggataaattgaattattattttataaggttgtaagtttatgtattaatggaattaatatggaattagagttaaattattgttttaaatatttaatgtatgttaagaaatttatttaattattaagtattgaaattataatatttttaaatgaatttataaagtaaaatagttgaattaatgatttgtaaggattttttggtagataaattttattgggaattaatatattattgttattaagaaagtaggtttaataaatgaataaaagaaatttagttaggtagagaggtttttgtttgtaattttagtattttgggaggttgaggtaggaggattgtttgtggttaggagtttgagataagtttgggtaatatagtaaagttttaaaaaaaattatttaggtttggtggtttatgtttttatttttaatattttgggaggttgaggtgggaagattatttgagtttaggattttgagtttgtagtgaattatgattagattattgaatttgagtttgggagtaggttgagattttgagattttgttttaaaaagtaaaaaatagaaatgttagttttttttatttagagttaaaagtttttatttattatttaattttattatggtttttttttaaaagtttattggtatattatattaagttagtaagtttttttttttgtagtagggttttattttgttgttaaggttggaataagttttttttaataaagttaagatggtttatattatttatgtggatgagggtgttgaaggatatttattgtttttttttatggttttattttatgattaaattaagatgtataggaaataggtttgataatttatttttattaagaaagatgatttagtaatagtggtagagttgtttgtttgaatttaattttggttattttagtttgaaatataaatggtagtatggagagtaggttgtttgttttttggttggatattttttttatttttgagtttgaggtatagtaaattttttaaattatttagatgtaaatattttaatatttagattaggg

SEQ ID NO: 2863 - DNA, 2456 bp, Artificial Sequence
  chemically treated genomic DNA (Homo sapiens)
ttttggtttgagtattggaatatttatatttgaatgatttgggaaatttgttgtattttaaatttaagagtgaaagaaatgtttaattaaaaagtgggtagtttgttttttatgttgttatttgtattttaaattgagatgattaaggttaagtttaaataggtagttttattattgttgttgaattgttttttttggtaaaggtaaattgttaaatttattttttgtgtattttggtttgattatgaagtgagattatgaaggaaggtagtaaatgttttttaatatttttatttatatgagtaatatggattattttagttttgttgaagagggtttgttttagttttggtaatagagtgagattttgttataaaaaagggggtttgttgatttgatatggtatgttagtgaatttttgggagggagttatgatgggattgggtagtaggtgaaggtttttagttttgagtaaaggaaattggtatttttgttttttattttttgagatagggttttagggttttggtttgtttttaggtttgagtttagtggtttgattgtagtttattgtagatttaaaattttgagtttaagtgatttttttattttagttttttagagtgttaggagtaaaggtataggttattgagtttaggtgattttttttaaggttttgttgtgttgtttaggtttgttttaaatttttggttgtgggtgatttttttgttttagttttttaaagtgttgggattatagataagaatttttttgtttggttgggttttttttatttatttgttggatttgtttttttggtagtagtggtgtattgatttttagtaggatttatttgttaggagatttttatagattattagtttagttgttttgttttgtgaatttatttgaaagtattataattttggtatttagtaattagatggattttttgatatgtattagatatttaaggtagtaatttaattttggttttatgttgattttattagtatatgggtttgtagttttgtgaaatgatgatttagtttatttatttgttgagtgtgttgtattgatttttttttaagttttagtttttgttttaggaatttgaggttatgtagtttgaaaatgttttgtagtttgtagtgttttattgtgaattgtttgtgtgttggtaggttattggtaagaatggttggtgttagtagggatggggttttttgagatttattttataaagatgagtggtgaaaatttgattatttgttgtagttttttagttttttattaagttgatgtttgagtagttttaatagttattagttatgttagtagattgagattttttgttagaagtttttagttttgttttttttgggggattaagaaattatattgtaggtttgaattataggaaggggagaattaatggttagggaatgagagttaatatttgtaaaagtagagttgggttgggtgtggtggtttatgtttataattttaggattttgggaggttgaggtgggtagattatgaggttaggagttagagattagtttgattaatatggtgaaattttgtttttattaaaaatataaaaattagttgggtggggtggtgggtgtttgtaattttagttatttaggaggttgaggtaggagtatttgggagaattgaattttgggggtggaggttgtggtgagttgagattgtgttattgtattttagtttgggtaatagagtgagattttgttttaaaaaaaaaaaaaaaaaagtagagttaatatattgtttatagttagttgaattagttgttttttatatattagtgttataatttaaagttgagattgaatatagataggtatgtattagttatttttaggatggtagagaatagtaataatttggagtattaatgggaatattgttttttgagagtttaaatagtaataaagtagtatgtgttttttaaatatgtattatgtgaatttttaatatttgtggatattaatataaatttagagtgtgatagaatatttttgaattttatatttttatttaataaatattggattaggtaaggtgtggatatttttttagttgaaaatttgattaaggaggtaggttttttggttttatgttaagaattattgatgatttgttatattggtttttttgttggtaaaattttagttttttaggtagtggaatgaaatataataaaataaaatttttagaggttaggaatagatagtttgaaagagaagatattgtagtatgtgttgtttaagtatatattttttgtttttggaatggaaattaggaagttatttaaatagatatgtgttttttttattttatttgtagtaatttatgtgggatatttaaataggaaaatataggttagtattgtatattgtatttatgttttatattgtatataaatg

SEQ ID NO: 2864 - DNA, 2488 bp, Artificial Sequence
  chemically treated genomic DNA (Homo sapiens)
tagaagtttttttaggtgtaagtgttagggaaggatgttgagataagagggagttagtgaagattgaaggaagagtgttagatagaggggttagtagatgtagagttttagggtgattggtggaagaaaggttagtgtggttggagtttggagggtgatagggagaggggtagaatttgaggttagagttgtgatttggggttgatggaataaggttttatgggttaaggtaaggaatttggtttttattgttagtaagttaaagatttgttagaatgttgagagttttgatttgtgtttgtagagatggatgagattgggtttagtgtaggtttaggattgggggatgtgtggtttgtgatagggtggtagagagggtatttaggagttgtggaaagattttggatatattttggaggtttttaattatttttatattttgttttttatagtagagtttttttgttagtgatttatgtttggtttttttatattgtggtttgagtattagagagtaatattgtaaagtttaattttttatagtttattgtaggaatgattttatttttgtttttaaggttagtatggtggagggattttatggtatgagtttttatgatgatattagatattggatattaaggagtgtgatgtttatttttggtttttagtgatttttgggtatagtttggatataaaagttagaatttgtttgatggttttttttttaagaaaaaaaaaaaaaaaagtaagtaagtttagggaagtagtttttttttttttggttaatatgaagttaagtgttttattattgtttagtttttttttaaatataaaaatattaattttaaaaagatattgtaaaaagtttaagaaatatgtatattgaatttgatttatgtatattattgtagttaatatttttagggaaatttttaaatgtttgttataggagtttgttagaaaaagaaagatttatttttggaaaagtatgttttttggtgtttattgagtttggaaattatggaaagttattgttagaagggaggtagttgttttagaggtggagtggaagttaggattggagaaggttgttttattgtgggttttagtgtgttttttgttgttagttggttaagagttttgtagtagttattttatattttattagttttattattgtaattatttttgttaaaatgaaatataaaagaatggtatgtttatgaatattttttatagaaaatatatttgtttgattattttttataaaatgtgaagttaatttttttttttatttttaattatgaaagtgaagtttggaagttttaatttttttgtaatggaaagatttgagtttgtggttttgtttttattttttattttttttttgttaagttaggaatatgatatttatataatattttttgggtagtggttttgtttaggaattgtatggttgtttgattgtagagggagggtaaaggttattattaattatttgtgttattgttgggttatgaaatttttaggggataagtataagttttataaaattttattttgaaatttagattagatttggttttatgttttgaggatttttttttttttttaagttttatgttgtttttttgtttttttttatttttttttgggaagagttttttattattataattattatttgaaaaaaaattttaagtaagaaagtagtgtattaattggaaagtaataatttagaaatgttattttttaatagtaagtttttatagtatttttgggtagaaaggtatttttatagaaatagttatttttttatttttttttttatgagtttataaaatagtatttttatattaatttttgttatatttaatatataaaattagtatttttttaagaatttagaagtttaagatatattaaaaatatttttgataataatttttatttttagaggtagtgttgttaataagttttatgtatttatttttagatttaataaaaatatgtttatttatatttatatatggtatttttgggtgggtatatgttagaagatttttttaaattgtgtttaattatatataatttaaaatttttaggtatatagttttgtggtattagtatatttatattgttatgtaatttttattattattatttatttgtagaatttttttttttttttttttaagatggagttttgttttgttatttaggttggagtatagtggagtgattttagtttattgtaatttttattttttagatttaagtaatttttttgttttagttttttgagtagttgggattataggtatgtgttattgtgtttgattaatttttgtatttttagtagagatgaggttttattatgttggttaggttgattttaaatttttgattttaagtgatttatttgttttggttttttaaagtgttgggattataggtgtgagttattgtttttagtttatttata

SEQ ID NO: 2865 - DNA, 2488 bp, Artificial Sequence
  chemically treated genomic DNA (Homo sapiens)
tgtagataggttgggagtagtggtttatatttgtaattttagtattttgggaggttgaagtgggtagattatttgaggttaggagtttgagattagtttggttaatatggtgaaattttatttttattaaaaatataaaaattagttaggtatggtgatgtatgtttgtaattttagttatttgggaggttgaggtaggagaattgtttgaatttgggagatggaggttgtagtgagttgagattattttattgtattttagtttgggtgatagagtgagattttgttttaaaaaaaaaaaaaaaaaaattttgtagatagatggtgataataaaagttgtataataatgtgaatatattaatgttatgaaattgtatatttaaaaattttaggttatgtataattaaatataatttaaaaaaattttttgatatatatttatttagagatattatgtgtaaatgtgggtaaatatatttttgttaagtttggaagtaaatatatagaatttattaatggtgttatttttgagaatgagagttattgttaaaaatatttttagtgtattttaaatttttaaatttttaaaagaatattgattttatgtattagatataataaaaattgatataaaaatgttattttatggatttatgagaaaaaagataggaaaataattgtttttataaaaatatttttttatttaggaatattataaaagtttattattaaaaaataatatttttaaattgttattttttagttaatatattgtttttttgtttggaatttttttttaagtagtaattatgataataagagattttttttaagagaaaatgaaggggggtaaagggataatatgaaatttaaaaaaaaaaaaaaatttttagagtataaggttagatttggtttggattttaaaatgaaattttatagaatttatatttattttttgaaggttttatgatttaataatgatatgaatggttaataatagtttttgttttttttttgtagttaaatagttatgtaatttttgaatagagttattgtttgggggatattatgtgagtattatgtttttgatttagtaaaggagaagtggaaaatggaaataaggttataaatttagatttttttattataaagaaattgaggtttttgggttttatttttatgattaaaaatagaaaaagaaattgattttatattttatggaaaatagttaaatgaatatattttttgtgaagaatatttatagatatgttatttttttgtgttttgttttgatagaaataattgtgatggtggagttagtgaggtataaagtggttgttgtgagatttttgattagttagtagtaagaggtatgttggagtttatagtaggataattttttttagttttgatttttattttgtttttggagtagttgttttttttttgataatgattttttataatttttaagtttaatgaatattaggaaatatatttttttaaaaataaatttttttttttttgataagtttttatgatagatatttagaaatttttttgaaaatattagttataatagtatatataaattaaatttaatatatatgttttttgggttttttatagtatttttttaaaattaatgtttttgtatttgggggaaaattgggtaatagtgaaatatttggttttatgttgattaggaaaaaggagattgtttttttgaatttgtttgttttttttttttttttttttaaaaaaaaaattattaaataagttttggtttttgtgtttagattgtgtttaaggattattaaaaattaggggtgagtattgtattttttgatgtttaatgtttgatgttattatagaaatttatgttatggaatttttttattatgttggttttggaggtaagaatggggttatttttgtagtgaattgtgggaggttgaattttataatattattttttaatgtttaagttatagtatgaaagaattaaatatgagttattgatagaaaagttttattgtggaaggtagaatatgagagtggttgagggtttttaaagtgtatttagaatttttttatagtttttaaatgttttttttgttattttgttataagttatatattttttgattttgagtttatattaaatttagttttatttatttttgtaaatataaattagagtttttaatattttaataggtttttggtttattaataataaaagttaaattttttattttggtttatgaggttttgttttattaattttaggttatagttttggttttaggttttgtttttttttttgttattttttaagttttagttatattggttttttttttattagttattttagagttttgtatttgttgatttttttgtttggtattttttttttagtttttattggtttttttttattttagtatttttttttagtgtttgtatttaaggggattttta

SEQ ID NO: 2866 - DNA, 2471 bp, Artificial Sequence
  chemically treated genomic DNA (Homo sapiens)
tgtaaatgaagttatttgttaaattaggggttaggtgtttagtttttatttatttgggttgtgtttttggttaatggttgaggtgattttttaggtatttatagtggagtatgtttttattttattgaatagttttgaaaattagagaagttgaggaaattatgttaaaattttttgagaaattttttttttgtatttggtaaaggtgaattagaatttgttatgtgagtgaggaggatattttttaatgaggtaagagttttataatttttatagttgtttagaaagtttttttgtgtgttttgagagagattgaaataaagggaagttgaggatagtttggttttgttttttgaaattatttattaaagtaagattattttaatttaatatgagaagtatatgtgtaattgtgtgagtgtgtgtttgtgtgtgggggtatatattgaaagaaaataaataaggatgaaggaaagaggaaaatagaattgttttatggaatatattgtgtattttaattaatgttttttatatttttattattttgtttgtaattttatttattattaatgaaattgttaatttgggaataatgttttaggtgttaggtgttatatttaataagaatttaaagagtgaaaggataaatggagggttattagtgtttaagatggttttttgttggttgttttggtgaagaatagtaatataaagggtaagagaaggattaatggaaattattgaataaagtgaggtttttgagttatttttagattgttttgtgtgttgttgtatttgtattgtagtgtggataattgtggtaggttattgttttagttttgttgtgagatagattttaatttattattttattttttagtatgagttagttaagggaaaaggatatttttagaattagagtgttttaagttttttgaaaggttattgttatttttttttttttttggtagtttttagtaaagtagaaatatttggaagttaattttgtttttttaatattgttgtgagttgattttatttgtttgagataaaattttttttttgatttagtagtgtttatggttgagttggttatgagatagaggattttgtgtttttaattatttttggatgaaaagttttgtaggtgagtggagatttggggtaaagatggttaggtggagttgttattagtgagtagtggattgtagaaatggagagataattaaattaaaagtgttaggtgtaggtattgaaaaataattttgggtgttaattatgtagtttagtgttagtagaggaaatgttattggtttgtttattatgtggtagttgaaaagtttgggaaagatatatttatggtttttagagaatttgttagggttgtttatttgggattttggtgaagtagagattatttattagttggagtgtgtatattttttttattttttatttagttaagttgggtatttggtgggtatttggtgtgtgggggattaattttgatttatatgaaaatttgaatgttggagtgtgttatttttaatttaggtatttaggagtattttttttttttttgatttgaaatgaatttgattttaggggttagaggtagtgtgtttttgttatgaagatggaaggataaatggtggtgtgtttagataatggaatagagtatagtaattaaaaggaggggattttagtagtataatagtagtatgattgtgttataagtatagttgaatgaatgaaagaagttagattttaagatttattttgtatgaatttattttggtgatgttttagaataggttaaattaagttatggaggtggatgttaggtttgtggttgtattagggaatttttggggtaatggggtaatttttttgggttgaagggtatatgaatgtaaatattttttaaaatttgttgaatgtatgtttaaaatttgtgtatatttttgtatggaaattattttttaatgaaaggaatgtgaaaagatttttttatgttttgtttttttatggattttgaattttggttagttagtttattttaaaaggtgataaggattaatttgtttgtggttttttttgattatttagtttttttttgtttatagatttgtttagaaaaggtttttattttaaggaagtagaatggaaaatagggtggtttattatagtttttgggttaaatttgtttaattatatttttgtaagtaaagttgtattgggatatagttatatggttagttatttatgtgttttttgtggttgtttttatgttatagtgatagttgaggagtttttatagagattgatttattatttaaagtgtttattttttatttttttatagaaaaggttttttggtttttggtttaaatatttatttttttttggaatttttttttttagatttgtgtgggtggaggttttggatggagagtgttttttaggaatga

SEQ ID NO: 2867 - DNA, 2471 bp, Artificial Sequence
  chemically treated genomic DNA (Homo sapiens)
ttgtttttggagagtattttttatttaaaatttttatttatatagatttgaagggagaagttttaaaaagaaatgaatgtttagattaagggttaggaaattttttttgtaaagggatagagagtaaatattttaggtggtggattagtttttgtaaaagttttttggttgttattgtggtatgaaagtagttatagaagatatataaatgattggttatgtggttgtgttttaatataattttatttataaaaatgtgattgagtagatttggtttaaaggttgtagtgggttattttgttttttattttgtttttttggaatgaaagttttttttgaataggtttgtgaataggaaaaggttgggtggttaggaaggattataaatagattaatttttattattttttgaaatgaattgattgattagggtttaaaatttatggaaggataaaatatgggaagatttttttatattttttttattgagggataatttttatgtaagaatatgtatagattttaagtgtgtatttaatagattttgaaaaatgtttatatttatgtgttttttagtttaagaaagttattttattattttaaaagttttttgatgtagttatagatttgatatttatttttatagtttagtttaatttgttttagaatgttattaaaataaatttatgtagaatgggttttgaggtttggttttttttatttatttaattgtgtttgtaatatagttatgttgttattatgttattggggttttttttttttgattattgtgttttattttattgtttgaatatgttattatttatttttttatttttatgatagggatatattatttttgatttttaaaattaaatttattttaaattagaaagagaagaaatatttttaagtgtttaaattggaagtgatatattttaatgtttaaatttttatgtggattaaagttaattttttatatattaagtatttattaaatgtttaatttggttgagtggaaaatgggggaaatgtatatattttaattaataaataatttttgttttattagaattttaagtaggtagttttggtaaattttttagaaattatgaatgtgttttttttaagttttttaattgttatgtgatggataggttggtggtattttttttgttaatattgaattgtataattaatatttagggttattttttaatgtttgtatttggtatttttaatttaattatttttttatttttataatttattgtttgttggtgatggttttatttggttgtttttgttttgaatttttatttgtttgtaggattttttatttagaaataattaggaatatagggttttttgttttgtggttaatttagttgtgaatgttattggattaagagggaagttttattttagataaatggagttagtttatagtagtgttaaagggatagggttgatttttaagtgtttttgttttgttgggagttattaaaaaaaaaaaaaagtggtaatgattttttagaaaatttggaatattttggttttgggaatattttttttttttggttggtttatgttggggaatgaaataatgaattggaatttgttttgtagtagggttagaatgatagtttgttatgattatttatgttatggtatagatatagtagtgtataaggtaatttggagatgatttggaagttttattttgtttaatagtttttattaattttttttttattttttatgttattgttttttattaggataattagtaggaagttattttgaatattgatagttttttatttgtttttttattttttgggtttttattgaatgtggtgtttagtatttaaaatgttatttttaagttggtagttttattaataataaataaaattataaataaaataataaaagtataggaagtattaattggggtatataatgtattttatgaaatagttttgttttttttttttttttatttttatttatttttttttagtgtgtatttttatatataaatatatatttatatagttgtatatatattttttatattgggttaggatgattttattttgataagtagttttaaagaataaagttaggttgtttttgatttttttttattttagttttttttaagatatgtaagagaattttttgagtagttgtgggaattgtggagtttttgttttattaaaaaatgttttttttatttatatggtaaattttagtttatttttattaagtgtaggagagaaattttttaggaaattttgatatggtttttttagtttttttgatttttaaggttgtttaataaagtagaaatatattttattatggatgtttgggaggttattttagttattggttagaggtatagtttaggtgagtgagggttgggtgtttggtttttggtttgatagatggttttatttgta

SEQ ID NO: 2868 - DNA, 2495 bp, Artificial Sequence
  chemically treated genomic DNA (Homo sapiens)
tttttttatgtttttttttttttttgttgtatgttttatatttttagtgtgtgtaaatattagagtaaagttgtaggttgaaaattgtagttttaattttgtaagaattttttggtgttttgaaagaggtagagggtatttagttttatttttttttagaggttgtgttgttttaagtattagaggttttgtgttttgtggaggggagattatagattttgattttaaaatggaagggtagaaataagattgtgagttgggatttgggaggggatgtttaatttgaagtgagttatgtttgatgtttgaagttttttggggtttaagattaatgttgttgttatttttttttttgtttttttagggggtttttaggtaatggtgtgttggagttagtttgttttggtttttaagggttgattgttaaatttttaggaattttgtaaattgtttgttaaatatagttattattaaaaattaaattatagaaatttatagtgtaataaattatattaaaataaagttaataaatatttgaaatttattattttttatttttttttattattttttatgtttttgagggtttttttttaaatgtttgggtttttatatagtagatataagaaataatggttagttattgtgtatttttttttaattatatgtttagtgagattatattgtttatttgatattgattatgatgatagtgtttatattttagaaattggtaaatgttatagatttgggttttttttttgtaaatgttgattaggtatttataggtatatgttattttaaggtaattattgttaattagaggaaatagaaagaagtttattaagtttgtttttttgaatagttatggtagttttaggttaggtatgtagtatgtttgagggtaaggttgtgttttgtgggaaatttttattattgaaagggtttttagttataaggattttttttggtttgatagttagtttggaggagtttggggttattattttatataagttttttgttataattgtattttggtttattttgatatttggtgtttattttaagttgaggttttagggaagggtagttggaggttagtggtggtttttagtgatagatgggtagagtgtttgttttggtattatttagggtgtgggtagtagtggtttgagtaggtattattgatttgtaggtagggaaagtttgttaggttagttatgtgtttggtattaggaggagaggattagagttagtagtggttataatgagggtaaaatttttatagtggaatattgttatttaaaagggatgggtggttgtagggttttttggatggaagtataaatgagaaaatatatatgtttttgtaaatggatttgtttgggaagataaggttatagtatatatagttttttagtaatttaaattttatgtgttatgatgtagatatttataggataagtaagaataataaaatttttagttttgttttttagtataagataattgaagatatttgtggtgaaaagtatttttgttattaggaagatagataatagttagtaattaatgtttttttgttgtataagttaaaaagtttattaaatttattttttttttagtgtatatataagaatatatttggatatttttgtaaatttatatttaagaatagtgttttttaaattggttatttgaaagaaatttaaaggaaaaagtagatatttttataatatgtttttgttttgttgtagtttgtaattgtgaatttttgtaaattgttataattttggatgaatgatgggaatataataggttgtagaattggagaatgttaaatttttgtttttaatggtaaaatatgttttttttatttttattagaatgtgtgatttatgttatttgaaattaaattttaaatataatgagttattagtgtaatagtttattattaatagtggttttataaataatatatttttattatatatatgtagtttgttgtgaagttagtaaaaggtattttaggttattgaagttttgttgtgttagtgtggttgtagattagaaggatatttttatgtgaattaagatggatgttaattttttttgttgagagttaggttggttgtttttttttgtatatatggtagatggattggttaattagtgtttgttgagttttgggtttgaaattatagagaagttagataattgtggttatgtagtttttgtttatgagtgtaaataagataaataattatttgttatttgggaaaaaaattaaaatgtttattttggatttttattaaagtgttaatggttttataaaatagttgtgtaaatttaggtttttttagtaagtattattttagggggtttgtaaagaaaggaatatatatgaaaaaattaatttttaaaaattttttttatattttagtattgagaagaaaatagaggaggttttatttttattttgtaaatatgtt

SEQ ID NO: 2869 - DNA, 2495 bp, Artificial Sequence
  chemically treated genomic DNA (Homo sapiens)
aatgtgtttgtaaaataaaagtgagattttttttattttttttttaatattgaaatatgaggggaatttttaaaaattaatttttttatgtatatttttttttttataggttttttaaaatgatatttgttgaaaaagtttggatttatatagttgttttataaagttattgatattttaataaaagtttaaaataaatattttaattttttttttaaataataagtgattgtttgttttgtttgtatttgtgaataaaggttgtatagttgtagttgtttagtttttttgtaattttaggtttaagatttagtagatgttgattaattaatttatttattatatgtgtagaaagagatggttagtttgatttttggtagggaaaattggtatttattttggtttatatggagatgtttttttaatttatagttgtgttggtgtaataaaattttgatggtttgaaatattttttgttggttttatagtgagttgtatgtgtatgataagaatgtattatttataagattgttgttagtaatgagttattatattaatggtttattgtgtttggaatttgattttaaatggtatggattatatattttgatgaaaatgagaaaaatatgttttgttattaggaataaagatttaatgttttttaattttataatttgttatatttttattatttatttagggttgtaataatttataaaagtttataattatagattataatagagtaaggatatattgtggaagtgtttgtttttttttttgagttttttttaaataattgatttgagaaatattatttttaaatatgaatttgtaggagtatttaaatgtatttttgtgtatgtattgaaaaaaaaatggatttaatggattttttaatttgtataatagaaaggtattgattgttggttgttatttatttttttggtgatagaagtattttttattataagtgtttttaattattttatattggagaataaaattgaaggttttgttgtttttgtttgttttgtaaatatttatattatgatatataaggtttagattgttagaaaattatgtgtattgtggttttgtttttttaaataggtttatttatagaaatgtgtgtatttttttatttatgtttttatttaaaaagttttatagttatttattttttttgggtgataatattttattgtgagggttttgtttttattgtgattattgttggttttgattttttttttttgatgttaagtgtatggttgatttggtaggttttttttgtttgtaggttagtggtgtttatttggattattgttgtttatattttggatgatgttaaagtagatgttttgtttatttgttattaggagttgttgttggtttttaattatttttttttaaaattttagtttggagtaaatattagatgttaaggtaagttagggtatagttatgataaggaatttgtatgaagtgatggttttaaatttttttaaattagttattaagttaaagaaagtttttgtaattaaaaatttttttagtagtaagggttttttatagggtatagttttgtttttaggtatgttgtatgtttggtttggaattgttatggttgtttagaaagataaatttgatggatttttttttgttttttttggttgatagtggttgttttaaagtaatgtgtgtttgtaaatgtttaattagtatttgtgggggaaaagtttagatttgtagtatttgttgatttttgaggtgtaagtgttgttattatggttaatgttaagtgaatagtgtgattttattaaatatgtagttgggagggaatgtgtagtagttagttattattttttatatttattgtatagagatttagatatttaaaaaaaaatttttaagaatatggagaatagtaaaaaaaaatggaaggtgatgaattttaagtatttattaattttgttttaatataatttattatattgtaggtttttataatttaatttttaataatagttgtgtttaataagtagtttgtagagtttttgaggatttaataattagtttttgagagttagagtaagttggttttagtatattattgtttaaaagttttttagggaggtaggaaaaagggtagtaatagtattgattttgaattttaaaaggttttagatattagatatggtttattttagattagatgtttttttttagattttggtttatagttttgtttttgtttttttattttaagattgaggtttgtggttttttttttatagaatataaagtttttgatgtttgaggtagtatggtttttggaaggagatggggttggatgttttttgttttttttgagatattaaaggatttttgtagggttggaattgtagtttttagtttatagttttgttttgatgtttatatatattgaaagtgtgaaatatatggtaagagagagaaagaatgtgggggaa

SEQ ID NO: 2870 - DNA, 2364 bp, Artificial Sequence
  chemically treated genomic DNA (Homo sapiens)
tatttggaaaataaatgttaaagagaagattataatggtttagaaggttggaaattgagtagttagtaagtgtgagagagggattatgagatataggatttagattgtgttttattatttatttattgggtgtttttagttaagttatttttttttgtattttttatatttttatttgtaaaaatgagttaggtattgtattttttaagtgtttttttagggttttttgaaattttattggttttttttttttggtttttgtgtttgtattttagtttttgtttttggtattgaggattttatttatgagaaggttttttaattagttaggttttgtttagttttagagtatttagaatgtttttgaaattatgattttaggttatttaatttgtatttagaaatgttttggtttatttgattttatttttttatttaatattgagagataatgtaatagagaagaaagattataggtttgataaatgatttttaatttagatttttgttagtattagtttaatttttttgaattatattattattatttaaaagtgtaataatgggttgggtgtggtggtttatgtttgtaattttagtattttgggaggttaaggaggaaggattatgaggttaagagattgagattgttttggttaatgtggtgaaattttgtttttattaaaaatataaaaattagttgggtatggtggtgtgtgttagtaattttagttatttgggaggttgaggtaggagaattgtttgaatttaggaggtggaggttgtagtgagtagagattttattattgtattttagtttgggtgatagagtgagattttattttaaaaaaaaaaaagtgtaataatgataatagatttagtatatagagaattatttagaagaggaaagaaaaaattgaggtttaagaggtgaagttatttgtttaggtttaggtttatatttgaatttagattttttgtgttttattttagagttttttttttttttagagttaaggttagttgtgtttatatggatatggtagtaaagattggaattgaaagtatgttagtttttttaatatttttgttaatagtttttttaatttttttgtggtatgtgttaataatatagtttgtatttgttttagaaataagtgttttataagtatttttgtttgatttgttttggttggtataggatttagatgtttttagaatagtataatagattttttaaattagtttatttttattttgagttatttatagttttgatttgttgttggttggggtttatttttgagttttttttatttattatgtgaattatgtttagatttttgttagtttgtttttttttttttgagtagaagtaatatttattgtgtgtatattgtgtgttaggtattgtgataggtattttaaatagattattttttttaatttttataatttattaagttattaatagttttaaaggggaaagttgaggtttagtgaagtgaatgaatttattgaagttatatatttagtttttgaaagagttagagtttgaattgagttttgattttattgattaagttgtaaggtaagttgttttttgagtattatattgtttttttgttttttggttatggtttttttaggagggtagagtgtttgggagtatttaagaataggtgtttggtgttttgagtgtaataggaatgttttttatgtttttagtgtatttttttgagagtttttgtattttgtgttttaaattaatttttttagaatttagatatagagtttagagatttaagtattgagttagaagttatgtttttattgtgattatggaatagagtttttagtgaaaagtatatttgttttttttaaagttgaatagagagagtattttaagtaataatttttatttgtatgattaattttaaagtatagggaaggaaagggaaagggtttgtattttttaattgtgataagttttttttagggatttggtaggagtggagatatgtatatataaaagattttaggattaagattgttttgataggtttttaaatttgtatttaatagtttgtaaagtagtttatttttaagaaattgtattgtgaagaaattgaaggaatttgtttttatgtgatagagttaggggttagagtttaaatttttagttttgataatgttagtgaggttaagttttttttgagagggttttttttttggtgttgggtgtatttagtttttatttgtaaaaggagtaggtttttagtttttgttttttttttagtttttttttgtttttttgtttttttttttatttatttatatttaattgttagggatttattttaa

SEQ ID NO: 2871 - DNA, 2364 bp, Artificial Sequence
  chemically treated genomic DNA (Homo sapiens)
ttgaaataagtttttagtaattgagtatgaatgagtgaggagggggataagagggtagaggaaggttgagaaaaagatagagattaagggtttgttttttttgtaagtggagattgggtatgtttaatgttagagagaaaatttttttagggaagatttagttttattggtattattaagattaaagatttggattttagtttttggttttgttatataaaggtagatttttttagtttttttatagtatggttttttgaaggtaaattgttttgtaaattgttgagtatagatttgagaatttattagaataattttagttttaaaattttttgtgtgtgtatgtttttatttttgttaggtttttggaggagatttattatggttgaggagtatagattttttttttttttttttttgtattttggagttggttatataagtaggggttattgtttgaaatattttttttatttaattttgaaaaggataaatatattttttattagggattttgttttatgattatgatggaaatatagtttttaatttagtgtttggatttttgggttttatatttgagttttagagaagttggtttgaggtatagagtgtagaaatttttaggaaaatatattgaaggtatggaagatatttttattatatttagggtattaaatgtttatttttgggtatttttaaatattttatttttttggaagggttgtggttagaggatagggaggtagtatgatatttaggaaatagtttattttatagtttagttaatggggttaggatttagtttaaattttagtttttttagagattagatatgtggttttagtaaatttatttattttattgagttttagtttttttttttggagttattaatagtttaatgagttataaagattaagggagataatttatttaaagtatttgttataatatttggtatatagtatgtatataataaatgttatttttatttaagagggaaaggataaattagtaaaagtttgaatgtgatttatatgataggtagggaagatttggggatgaattttagttagtagtagattagagttgtgagtggtttggaatgggaataggttgatttggagagtttgttgtgttattttaagagtatttggattttgtattagttaaagtaaattaaataggagtgtttatggagtgtttgtttttaaaataagtatgggttgtgttattgatatgtgttataggggaattgagagggttgttggtggagatgttaaaaaagttgatatgtttttagttttaatttttgttattatatttatatgggtataattgattttggttttagaggggaaaaaaattttggaatgagatataagagatttggatttgggtgtgaatttgaatttgaataggtgattttattttttgggttttagttttttttttttttttttaaataattttttgtgtgttgaatttattattattattgtatttttttttttttgagatggggttttattttgttgtttaggttggagtgtagtggtgggatttttgtttattgtaatttttgttttttgggtttaagtgatttttttgttttagttttttaagtagttaggattattggtatatgttattatgtttaattaatttttgtatttttagtagagatggggttttattatgttggttaggatggttttaattttttgattttgtgattttttttttttggttttttaaagtgttgggattataggtatgagttattgtgtttagtttattattgtatttttaaatgatggtgatatggtttagaaagattaagttagtattggtaggaatttgaattgggggttatttgttaagtttgtagttttttttttttgttgtattattttttaatgttaaatgagggagtaggattaggtgaattaaggtatttttagatgtaaattgaatggtttgaaattatagttttaggagtattttaaatattttagggttagataaagtttggttggttaaaaagtttttttataaatgaaatttttagtattaaaggtaaaagttagagtataaatataagagttagaaaaaaggggttaatgaaattttagaaagttttgaagaggtatttggagaatataatgtttaatttatttttatagatggggatatggaggatgtaaagagaaatagtttgattgggaatatttaatgagtgggtgatagagtataatttgggttttatgttttatggttttttttttatatttgttagttatttagtttttaattttttaggttattatgattttttttttgatatttattttttaaatg

SEQ ID NO: 2872 - DNA, 2472 bp, Artificial Sequence
  chemically treated genomic DNA (Homo sapiens)
aggagtagaaaaataattattagttagatggaagaaattattagtttataaatgtagtgtgtttagtaataaaattttttaaaatgtggatgatataggtgtaatagaatataaagaggtttttagtggaaagtttgggaagttttgtagagatgtagtggattttgaaggttaagaatatggagttagataaaattaaattttaatttttattttgtgattttgggtaagtaatttaattttttttggatttagattttttatttgtaaagtggagagaatgatgtagggaagggaggggagtgggttattgtgtagatttatggaaataaaggatagatagtggatatggttagtttggttgttattattatttgttagtagttttagttataataagttagaggtaagattaatatttttttttttttttttttaatttttttgttttttatattgttataattatttttattttttttatttttgtttatttaatggtggttttttattagttagttatataaaagtatttttattgtagttatttatattttagtatgaatgagttagtatttttttgtagtaatttttattggaagttagtgggaagtgaaaggttttggttattttttataatatatgatttaaagtttgtttgtaatagagagtttttgtagagtttttaaaagaaaaggatttgttttttgaagaatttttgagattatagattttatggtgtttagttttttttggttgttatgtgttatttttaaagatagttatgaatatttgttttggttgatttgagttatttgaatgtttaaaatttattttaataataaaagttttttggagggattttaattaatttttttaaattgttttttttaaatttttggaattaatataatttgtttttttgttattaaaaaaaaaaaataaaattttaggatattttgtaaaattttttttaagttatttggtagttaatattttgttaaggaggtatggtggttaatttttttttgaatgggattggtttttatatagttattttttttggtttatgatttttttttttatttgttgtttatggatgttgaaaataatttgttttttggtaagtttgggatgagattttttatgatttaattagatttataatgaagtttttttagtttttaggagaaaatattttgaattgtagggttggttaagggtagggttttggtgaagaggaggagttttttgtttgagtagtatatttggagttaggagagttgtaatagggttatgttatttatttagtggggtgtttttattgtggttgagatttttggtagtgttttaaggtgtgtattatgtaagttgtgtttttttattttttgtagtttagattaaaggttttaaagataataggtaggatattgtatttgtaaatattagttgtttggtttaggaagagatagttttttatatatatatatatatatatatatatatatatatatatagagagagagagagagagagagagagagagagagagagaaggaggaggagagagattaggatagatttgttttggttgaaattaggatttttttgatggttttaaattgatgttaaattagaggataattttagatatgataataagttgggggtggtaaagtaggtgggtaattagggagtatttgagtaggtgatagagaattggataatgaagaagtaggtaaggtgatgggaagtagttggggtaagagggagtagttaggtaataaggtaaagtagttggagaatgggagagtaatttgatgatgaaggttaggtataaagtgggagttattgtagtggggtaatagaagatagttttagatttggggtagaggttattttgatttgttttagttgtttttattttgttatttttttaggttttgttgttgagaagtaaatttagtttaagtttgtattagttagttggaatttgggttgttgtaaattgttgtggtgaagttttttgggagtgaggttgaggttgtagtagtagtaggtaggtgtggtgagtttatttttttgagggaggggttttttttttttttagttttttaaaggatgggtgaggttgtttgttagaggttttggtataatttatatttgagtttttaatttttttattattatttttattttttttttaattagatttttattggataatttaagtattaggtattgtgttaaaaatttttttatgtattaatttattgtatttttttaataattttataaaataggaattgttagtaattttattttataggtggataaattgaggtttaaaaagtttaataatttgtttatataagaggtgtagttaggattgtttgattttagaatttgttttttaagttttatgttatagttatggttatttttatatggagtattttttttttaaaagtt

SEQ ID NO: 2873 - DNA, 2472 bp, Artificial Sequence
  chemically treated genomic DNA (Homo sapiens)
agtttttgaaggagaaatgttttatgtagaagtaattatgattgtggtataaggtttagaggatagattttgaagttagatagttttggttatgttttttatgtgggtaagttgttagattttttaagttttagtttatttatttgtaagatggggttattaatggtttttattttatagagttgttgagaggatgtaatgagttgatgtatagaaagatttttagtataatgtttggtgtttaagttatttaataaaaatttggttgagagaaggatgaaggtgatgatggggaaattgggggtttagatgtgagttgtgttaggatttttggtaggtaattttatttattttttgaggggttgagagaagagagagttttttttttaaggaaataaatttattatatttatttgttattgttataattttagttttatttttagggagttttattataatagtttataatagtttagattttagttaattggtatagatttaggttgagtttattttttagtagtaagatttaaggaagtggtaaaatgaaggtaattggaataggttagggtagtttttattttaggtttggggttgttttttgttgttttattgtagtaatttttattttgtgtttggtttttattattaagttatttttttattttttagttattttgttttattgtttggttatttttttttgttttagttattttttattattttatttgtttttttattatttaattttttgttatttatttagatgttttttgattatttatttattttgttatttttagtttgttattatatttggagttattttttaatttaatattagtttggaattattaagggaattttggttttagttagggtaagtttgttttggtttttttttttttttttttttttttttttttttttttttttttttttttttttttatatatatatatatatatatatatatatatatatatgtaggaaattgtttttttttggattaagtagttggtatttatagatgtgatgttttgtttattatttttgaggtttttagtttgggttgtagggagtgggaaggtatagtttatatggtatatattttggagtattgttaggagttttagttataatgggggtattttattgggtgggtggtatggttttgttgtagtttttttggttttaaatgtgttgtttaggtagggggttttttttttttattagggttttgtttttaattagttttgtagtttaggatgtttttttttgaaagttgggagagttttattatggatttgattaaattataaggaattttattttaagtttgttagaaaataagttatttttggtgtttgtgggtagtaaatggagaagaaagttatgagttggaaggaatgattatatagaaattaattttatttaggggaaggttggttattatgtttttttgataaaatgttagttgttaagtaatttgggggaagttttgtgaagtattttagggttttgttttttttttttaataataagggaatagattgtattaattttaaaagtttagagaaagtaatttaaagaagttaattagggtttttttaaagagtttttgttattaagatgggttttagatatttaaatggtttaagttaattaaaatagatatttatggttgtttttagagatgatatatggtaattaggaaaagttgggtattatgaggtttatggttttagaagttttttagggggtaggttttttttttttagagattttgtaagggttttttattgtaagtaggttttaagttatatattatgaggggtggttaaagttttttattttttattggtttttaatgaaaattgttgtaaaaaagtgttgatttatttatattaaagtgtaaatgattgtaataagaatatttttatgtgattgattgatagaaggttgttattgagtaaatagagatagagaaaatgggagtagttatggtaatgtggggagtagaagaattagaaagaaaaaggaagagatgttaattttgtttttggtttattgtaattgaggttattggtagatgatagtaatagttaaattgattgtgtttattgtttattttttatttttatgaatttgtatggtgatttattttttttttttttttgtattattttttttattttatagatgaggaatttgagtttaaaagaggttaagttatttgtttaaggttataaaatagagattaaaatttagttttgtttgattttatatttttaatttttaaggtttattgtatttttgtagagttttttaagttttttattgaaggtttttttatattttattgtatttatgttatttatattttgaaagattttattattgagtatattgtatttgtgaattaataattttttttatttggttgatgattatttttttattttt

SEQ ID NO: 2874 - DNA, 2397 bp, Artificial Sequence
  chemically treated genomic DNA (Homo sapiens)
tatttatttatttatttatttatttatttaaattttgtagagtgttttttttttggtggggtgggtgttaaatattggtaagttattagatgattttaaagtttatgttttttatttggaaaatggaaattataaatttaaaggaatgatgttatatagattgaatgagatttatgtgtgaaaaggttagtaaataagagttggaatgtaagtttattggtagggtagaaatatttttgattttgttttatgtttttggtattggtattgttgttggtatatgttagatagtgttattttagtgaataaaataataaatttagttttgtgttgtagatagggaaatagaggtttagagaaaatggtttgggtggggggggggggggtggggtggtttggtagttttatttagggttttatttattttttttttattttgaagttatgtatttgaaaagattgggaagattttttattttattagtggtttatgtgtttgatatgtttttttaagagatgatgatggtttttgtgggagttatagttgtttttagtgtagttataagtaagagggaagagggtaaagattttggaaaaagtaggataaagttttgtaaatatggatattatgtgtgtattggttgggggggttttttttttgagggtttttttttggttagtagaatgtttagaagaggggtttgggtgggtataggtaaataatttattttttaaaagttaaattttttagttgtagatagtattaattttgagttatttttagatatggaaaaatattgaggttttgagagttaatagatttggggttttaatttttggtttttatttttgagttatttgattttgagtaagtgatgaatgaaaatattttgattttgaggattttattagaaaatggggatgagaatatttatatgtaaaatgggatagtgtaagtttagggtttgatatggtgtttaatatttagtgaatgttagtttttttttttttttttttgtttttgtgataaatgttttattaggttagtatgtttgataaagttttatttgaaaatatgtttgagatttgtgtttttgttgggttttagggattagttggtaatttattttatggataatattattttttattaggggaaatattaaaaattaatttagaggattttatatttttttgttaggagtaaagttgttatggttattagataatgtattgattgggttggaatatagataaggatgatttttttttgtttttaatattagaaaggtaaaggttttagtgatggtttataggagaaatgttttgtggataaagagaatataattagtattagagtttggtagaaggtatttgattttaggtagtatttaatttattaagtagaggttaggagtttatttgatttttgtttggatgaggaaggtagggagggggtgttgggagaagtgggagataaagttaggaggaaattggaagtatgggtgtatttttaggttttattttttattatatttatatatataatgtatatttatatgtatatatatatatatatgtgtttattgattttagaaggttttaagttataagttaatgttaaaggttttttttttatttttagttatttgttatgattaagttaagattttttgattttgaatttagagttagggtttttatagaggatatgggtattttgtggatagaggttagggtaggtttttagagagttgggataggtattgattttttattattatttttttgtttttaatatttagatttttgggagaaattttaagaggattagaggttagagaagttgttggttttgattttaggagaaagtattttatgtttttgtttattttgagtgagataggagggttatatgggttagatggatgtgaatttagatgggttggggaggggaagttggaagggtttattatattaggtaatggtgtttttggttttgagttttaggaggtgagatgtttgttttttattggatttattaaattgtagggaggtttaagaaatgaattttagagtgtgatttaggagttttgtgtgtgggttgtgttattagttttttgggtgattttgagtaagtttttttttttgtttggtttttgttttttttgttgaaaagtgtatggttggtagtagatggtttatagtttttttttattgtaaatatttgtatattttggaggggaagtgatgataattagaagtatttgaaaaatgtaggggagaagtttaggtttgttggattaggaatatgattttaattttaaattagggtagggtgaagtttttttttggatttgatgataagaaagtggggggtagtggtttttataggat

SEQ ID NO: 2875 - DNA, 2397 bp, Artificial Sequence
  chemically treated genomic DNA (Homo sapiens)
gttttgtgagggttattgttttttatttttttgttattaggtttaggaaggggttttattttattttggtttgggattagggttatgtttttggtttagtgagtttaagttttttttttgtgttttttggatatttttgattattattattttttttttaaggtgtataggtgtttgtagtaggaaggaattatggattatttattattagttatgtattttttagtagagaaaatagaggttagatagagaaagagatttgtttaaggttatttagggagttagtggtatagtttatatatagagtttttgggttatattttggaatttattttttgagtttttttgtaatttggtggatttaataagaggtaaatattttattttttgaggtttaaaattaagaatattattgtttgatataatgagtttttttagttttttttttttagtttatttgagtttatatttatttagtttatgtggtttttttattttatttagaatagatagaaatatgggatgtttttttttggggttaaggttaataatttttttgatttttaatttttttgaagttttttttaagggtttgggtgttagaggtaggagggtgatgatggaaggttaatgtttattttagttttttaggggtttgttttggtttttgtttatagagtgtttatattttttgtaaaaattttagttttgggtttagaattagggagttttggtttggttatagtaagtagttagaggtggagagaagatttttggtattagtttatagtttagagttttttaaagttaatgagtgtatgtatgtgtatgtgtgtatgtaggtgtgtattatgtgtgtgagtgtgatgagaaatggagtttaggggtgtgtttatatttttaatttttttttagttttgttttttattttttttaatattttttttttgttttttttatttaggtaaagattaaataagtttttggtttttatttaataggttagatattgtttggagttaaatgttttttgttaagttttgatgttgattgtattttttttgtttatagggtattttttttgtgagttattattggggtttttgtttttttgatattaaaaataaaaaaaagttgtttttatttgtattttagtttagttagtgtattatttggtaattatagtagttttgtttttagtagaaaaatatgaagttttttgggttaatttttaatgttttttttggtaaaggatgatgttatttatgaaatggattgttggttgatttttgaaatttggtaggagtatggattttgaatatatttttagataaggttttgttaggtgtgttggtttaatagagtgtttattatagagatagggaaaaagaaaagaaaattaatatttattgagtgttgggtattatgttgggttttggatttgtattgttttattttgtatgtgggtatttttatttttattttttgatgaggtttttggggttagagtatttttatttattatttgtttaaggttaagtagtttagaaatgggagttaaggattggagttttaagtttgttaatttttaaagttttaatgtttttttatgtttggaaatggtttaaagttgatgttgtttatagttagagagtttggtttttggaaaataaattatttgtttatgtttatttagattttttttttgaatattttattggttaggaaaaggtttttggaagaagggtttttttagttaatgtatgtatgatatttatgtttgtaaggttttgttttgttttttttagggtttttgttttttttttttttgtttgtaattgtattgaaaatagttgtaatttttatagaaattattattattttttgagaaaatatattaagtatatgagttattgatgaagtggagaatttttttaatttttttaaatatatgattttagggtggggagaaaataaatagggttttggatgaagttgttagattattttattttttttttttttgtttaggttattttttttgggtttttgtttttttatttgtaatatgggattgaatttattgttttatttattggagtggtattgtttagtatgtgttagtgataatattagtgttaaggatgtaaaataaagttaggggtgtttttgttttgttagtaggtttatgttttggtttttgtttgttggtttttttatatgtaaattttatttaatttgtgtgatattatttttttggatttatgatttttgttttttaggtgaagaatatgagttttggaattatttaataatttgttagtatttagtatttattttgttaaaaaaaaagtattttataaagtttgaatgaatggatgaatggatgaatgaata

SEQ ID NO: 2876 - DNA, 2466 bp, Artificial Sequence
  chemically treated genomic DNA (Homo sapiens)
tttagatgttagtagttttttttatttttaggtatgttaataaaaatgtttttagatattgtaaaatggttttttttttgggtaggtagaattgtttttattattggtatagttaggtaaatgtaatagtttaatatttagtagatattattatgtgtttagtattttaaatatagttttgatttttataatattaataaggtagtgattattttttttgttttataggtgaggaatttagggtttagaaaggttaattttaaatttgtaaaataggtaaagggaataggtgggatttgagtttagttttttagtttgttgagagtatgtttttttttttatttaatttggttgtttttttttaatagtaaatgattggttaaagttttgtaaatgtttaataatagggaattggtttagtaaattatagtgtattttttggatggaatattatgtagttattaaaatgatggagggttattaaaaatgaaaattatgtaatgatatggaaaaatgttaattggattatattaagttaaaaaaattagaaaataaaaatgtgtttatattgtgattataatgatgaagaagtatatttatgtgtggatggtttatgtgttggattgaggatattaaggataattttttttttttttttgatatttattattgttattagagtgtttttatgattttaatttttaagtagtagtagagtaatgataagatttaagatgttaggtttgttttaggttttttttttatttgaattagaatgaagatttttttaaattttgattatagtaaggggttgatttatttttatttttttttttattagtattgttgtatgtatgtttgtgattttaggtttttttttttgtattgattagttttttttaagtatagaaagttggaagtatagaagaaaataattttgaaggtattggtgtgaattattttgggagttagggttattaggaatatatagttttagagtagtagatggtatttgtttgttatagggtattgagtggtgtattgttttatgtattatgtattaagagtggtttagtattttggtttggttgtgtgggataagttttgtaaaagaaatatttgatgaattgattgggatgttaaaatgttattaaggataaattaatggatgtgttattttggttgtaagaggtagtgttagtaagataatagatagttggtgggttgttttttagtttaagatagatggtgtttgtaatggagatttatggtttttatgtaatgtgaggtgttttgtagggagaagaataaatagaaatgttttagtatttaagtgttataaaattataagtatgagattaattaattagtgtatattaggaaggtggttggtttgtttgtgtttttggggaaagttagaatggatggtattgggttagagatgatgggtttttgtattagttttttaaagaaaagtaattgaatttaatgtgtaattataaattgttgttgatggaaagataagtttggttggtgtttgtttttttagggatattatttttgtttattgttttaaatattttgtgtttgtgggttaagtatttgagaggattggggagatttggaaattagttttgtttataatgttatgtgggttatgaagggtgttataattttaatatatagagtaatttttagggaagtttgattttttttgtgtttttttagatagggggttgtttatttttttgtgataggaggtttattattttttttttaatttgatttagtgttagataagtattgttagagagtttttttttagatttttttagtttttttttttttataatttaataataataaagataagaaggagaatagttaatgtttattgagtgtttgttgggtgttaggtattgggttttggttaagttataatgttattatgtattatttttattttgtagtgtaggaaaaagaagattagagggtgtgaaagatatgttgaagattgtatagttagtatatggtagggttaagatttaaatttggggttgtttgaggttagggtttgatagtttaattattatatggttttaagttttgtaattattattaattggatggagtttggtttttagagtaatatagaatatgataaggtaagatagatgagaatttatatgtagtatatattgggtattgttaagtatttggtttgggttagtttaatatattgtttatgtagtagttttttttgagtaatgaaattatttttttatttgagatatttatttttttatttttttaaaaaagttatatatatatatattttttaatatataaaaattggttttatttttgtgtatttataatgaataattagaatttgaatttttataaatagtataatttatagtagtatttaaaaaagaaatatttagatataaatttattaaaata

SEQ ID NO: 2877 - DNA, 2466 bp, Artificial Sequence
  chemically treated genomic DNA (Homo sapiens)
tattttggtggatttatatttgaatgttttttttttgggtgttattgtaaattgtattatttatgaaaatttagattttaattgtttattataaatatatagaagtgaaattgatttttatatgttgaaaaatatatatatatataatttttttaaaaagataagaaaatagatattttagatggggaaataattttgttatttaaaaaaggttattgtatgaatgatgtgttaggttgatttaggttaggtgtttagtagtgtttaatatgtgttatatgtgagtttttatttgttttgttttgttatattttgtattgttttaaaagttaggttttatttaattaatggtagttataggatttagaattatgtgatagttaagttgttaagttttggttttaggtagttttgggtttggattttggttttattatatattagttgtgtgatttttagtatgttttttatattttttggtttttttttttttatattgtaaaatggagataatatatgataatattgtaatttgattagagtttagtgtttggtatttagtaagtatttagtaagtattagttatttttttttttgtttttgttgttgttaagttataaggaggaagaggttagggaagtttaaggaagaattttttaataatgtttatttaatattgggttaggttgaaagggaagtggtgagttttttattatagaagaatggataattttttatttagaaaggtgtagggggagttaggtttttttgagagttgttttatgtgttgagattataatattttttatagtttatatggtgttataagtagaattagtttttaggtttttttagtttttttagatatttgatttatagatataaagtgtttgaagtagtaggtagaaatagtatttttgaaaaaataaatattgattagatttatttttttattagtggtagtttatgattgtatattaaatttaattgtttttttttaggaggttggtgtagggatttgttatttttaatttagtgttatttattttagttttttttaggagtgtagatagattagttgtttttttagtgtatattaattaattaattttatgtttgtgattttatggtgtttaagtgttggagtatttttgtttatttttttttttgtaaagtattttatgttgtataaagattatgaatttttattgtaaatgttgtttgttttgggttggagaatagtttattggttgtttgttgttttgttggtattgttttttatagttaaagtaatatatttattaatttatttttaatgatattttgatattttgattagtttattagatgttttttttgtaagatttgttttatatagttgggttagggtgttaggttatttttgatgtataatgtatgagatagtgtattgtttagtattttgtgatagatagatgttatttgttattttaagattgtatgtttttaatagttttggtttttagagtgatttatattaatgtttttagagttgtttttttttatgtttttagttttttgtgtttgggagaagttggttagtgtaaggagaggggtttggggttataaatatatatgtaatagtgttaataggagggaaagtaagggtaaattaattttttgttatagttagagtttagagaagtttttattttaatttaggtggaagaagggtttagggtaaatttaatattttgaattttattattattttgttattatttagaaattaggattatgaagatattttgataataataatggatattaaagaagaaaggaaaattatttttaatatttttaatttaatatatgagttatttgtatatagatatatttttttattgttgtaattataatgtagatatatttttattttttagtttttttaatttaatgtaatttagttagtatttttttatgttgttatatggtttttatttttaatggttttttattattttaatggttgtataatattttatttaggggatgtattataatttattgaattagttttttattgttagatatttatgaggttttaattgattatttgttattaaagaaaggtagttaagttgggtgaggaggagagtatgtttttagtaggttgaagagttaggtttaaattttatttgttttttttatttgttttatgagtttaggattaatttttttgggttttgaattttttatttataaaataaaagaaataattattattttgttagtgttgtgaaaattggagttatgtttaaaatattaagtatatggtagtatttgttaaatgttaaattgttatatttatttaattatgttagtagtaggggtaattttgtttatttaaaaagaaaattattttgtaatgtttagagatatttttattgatatgtttgggagtagggggaattattggtatttaga

SEQ ID NO: 2878 - DNA, 2496 bp, Artificial Sequence
  chemically treated genomic DNA (Homo sapiens)
taattattatggaattttagaattattggaggagtaggattttttaaaatttatttttgtgattgttattggatgttaaaattttttgtatatttttatttagtggttatttagtttttgatagtttttaggtttgaaattttattttgaaatattaagaagggaagttgtgtttattatttagatatttatttttattttatttttttgaagaaattttttttgtttgtttttttagttattttttaatattttgtttgattttgtttttttaatagatgtgttaggtgttgatttaggtatggaggttttgattgtgatgttatgtagtttatttattgttatttagattgagttggtgagtttatttatttaatttgttaaaattagatttggtggaaagtgaggattttaatatttttatatttgttgataattttaaatttttattgaagagtgggaagttgttgtttggaattatattaagattaataatgataatagagataatgataattgtaaatatagtaatttttttatttataatggtagttttgattgtataaagaatttagtattaggaagggatatattttaagttattttggaattgttttttaatttgtgggataaagatagattaaatattattttgtattttttaaattttgaataaataggtaaatagtttttttgttaagtaggagaaaatattgggaggagatgagtttaggttttttaatatgtttttattttattggttagtaggtttatggtttagagagaggttgaagttggagatagggattttagaattatttgtagagttttttggttgaggttttgggaattaatgaaattgtagtattagagagtattggaggagaagggaagtggggagttgttttagagaataagttagaatagaaatagttaagatagttaaagtaggagtatttggagattaatgtgaagggaaagaagtgagagatatgtggaagaggtggtaatttttgttaaaggggattaagaataaggagttttaagaattttttgtagggttgttggttggagatgttgtttttatgtaaattttatttgttgttgttaatttagattttgttttattatgattatttttgagaaatagatttaagatatgaaaaaaaattttttttttgtaaaattggtttgtgaaatagattataggtattaatattttttatgagtgataatttagggttaatatttatattttgtaatgtttgtttttttttttttgggatagaaaagaatgttgttaatattaatgaataaatattaataaaattaaatataattttgttttatttggaattaatttttaaaaaaatttttaatatttgtatataatatatatatatttttatgtataatagggaaattagattttgtttgagagatgtgtatagtatttaatgttaatttatttggttttattttttttttagattgttttagaagggtagtgtttttagaattgagattttgaattagttttttttgatttttaggtatagaatgtttagtttaagttaagatatattaaatatttatttatttttagatttttaaaaatttagttttttgtttttttttgtagttgattttttttggtagaaatttagttttaaattgggagaaatgagtggattattagaattaaagttgatgttagtggtattgtgggttggtgtatgatgtgggaattttgataaatagaaatgaatgtttataaatgttagattttaggtttgtaaggaaagattttgttgtattttataaatggatttgttttttaatatgttttttgttttaggataagtaatgttggttagaattttgggggtgaatttaggggtttgtattatttggggttgtgttgttatttttgtttttagtattgtagaggttaaattgtatttagatgagattttagggaaagagaaaagaattttgggtatgggggttattatttaaagaatttggtgtagtgtgtgggagatattgtatgtatttttaatttagatatattattaatttatattattttttttgtgtttattaaattaggattttttagttttattattattgatattttgggttagaaaattttttttttgtggaattgtttagtgtattgtaggatgtttagaagtatttttggtttttatttagaagatgttagtagtattgttttggttgtgataagtagaaatgggtttagatatggttaaatgttttttggtgagagggtagtaaaatggtttttggttaagaattattgtagtgaattatttaagggattatgagtgaagttttgaataatttatatttgagttaagtggtgttagagagatatttgtaggattttagttttgttagtttgatattttttttataagtttattgattggagattttaagtatgttgtagtttttatttaatagatt

SEQ ID NO: 2879 - DNA, 2496 bp, Artificial Sequence
  chemically treated genomic DNA (Homo sapiens)
gatttgttaggtaggggttgtagtatgtttggggtttttagttggtgggtttataggagagatgttagattaataaagttgaggttttgtaagtatttttttggtattatttagtttaggtgtggattatttaaaattttatttatggttttttgaataatttattgtagtagtttttaattaggggttattttgttatttttttattagaggatatttgattgtatttggatttatttttgtttgttataattgggatagtattattggtattttttgggtagaggttagggatgtttttaaatattttatagtgtattgagtagttttataagaaaagaattttttggtttaaaatgttaatggtggtgaggttgagaaattttggtttagtaggtataagagggatggtgtgaattaatgatatgtttgagttagaggtgtatgtagtattttttatgtattatattaggttttttgaataatgatttttgtgtttaagatttttttttttttttttggggttttatttgggtatagtttggtttttgtgatgttgaggataggagtgataatgtagttttaagtggtatgagtttttaggtttatttttagagttttgattaatattatttgttttgaaataggagatatattaaaaagtaagtttatttgtgaagtatagtaagatttttttttgtagatttgagatttaatatttataaatatttatttttgtttgttagggtttttatgttatatattaatttatagtattattgatgttagttttgattttggtgatttatttattttttttagtttgaggttgaatttttgttagaggaggttagttgtaggaggagatagaaagttggatttttgaaaatttgggagtggataaatatttgatatgttttggtttgagttggatattttgtatttgagagttagaggaaattaatttagaattttaattttagggatgttatttttttaaagtagtttggagaaaaggtggaattaaataaattggtattaaatattgtgtatattttttaggtaaaatttgatttttttattgtatatagaggtgtatgtatattatatatagatgttaagaatttttttaaaggttgattttagatggaataagattatatttgattttattaatgtttatttattgatattggtaatatttttttttgttttgagagaaagagaatgaatattataaagtgtaaatattggttttaaattgttatttataaaggatattaatgtttgtagtttgttttatgaattaattttatagaaagagggtttttttttatgttttgagtttgttttttagaaatggttgtggtgggataggatttggattgatagtggtaaatgagatttgtatggaggtagtgtttttaattaatagttttgtagaaagtttttagaattttttgtttttaattttttttggtaggagttgttattttttttatatgttttttatttttttttttttatgttggtttttggatatttttgttttggttgttttgattgtttttattttagtttgttttttaggatagttttttatttttttttttttttggtattttttggtattgtaattttattaatttttaaggttttaattaagagattttatagataattttgaaatttttgtttttagttttaatttttttttgaattatagatttgttggttaatgagatggaaatatattgagaagtttaaatttgtttttttttaatatttttttttatttaataaaggggttatttatttatttatttaaggtttaaaaaatgtaaagtggtgtttgatttatttttattttatagattaggaaatagttttaagatagtttaaaatgtgtttttttttggtattggattttttgtgtaattgggattgttattgtgagtgggagagttgttatatttgtagttgttattatttttattgttattattaattttaatgtgattttaagtaataattttttattttttgatgagagtttaaggttgttagtaaatgtggaaatattgaggtttttattttttattaaatttggttttaatagattagataaatgagtttgttagtttagtttaaatggtaataagtaagttatatgatattatagttagaatttttatgtttgggttagtatttaatatatttattaagaaggtaaagttagataaggtattagagagtgattgagagggtagatagggaaggtttttttagggaggtgaaataggagtgggtgtttgagtggtgaatatagtttttttttttaatattttagagtagagttttaagtttggaggttattagaggttgggtgattattagatgaagatgtgtggaggattttggtatttaatagtgattatagagatgggttttgggggattttgtttttttagtgattttgagattttatgatgatta

SEQ ID NO: 2880 - DNA, 2474 bp, Artificial Sequence
  chemically treated genomic DNA (Homo sapiens)
tttggaattggatgttattaatataaagagaaaaatgtaaaatggtaagtagtaagtatattttagagtgataatgaaataagggtttttatttttgtagtattggttagtttgtttttatttttattttttttaattttttttttatagggatttttttaaattttaaatttgattaagtttgttttatttggatttattttaggttttttgttgttttgagaatagaatttaatttttaatttggtttttaggttttttttggattagatttttttatttgtttggttttttttttgttttgtatttaatagttttgtataattttttaatttttttagtttggttaagttaatttatattttagggtttttgtataggttaaatttttagttaagaatgttttttgtttttttagatttttattttgttatttattaatttaatttatttgtttgtttagaaaggtttttatttattttttttagttttttgtaaataggattaatttggttttttatagagtataagtttttattttattgtattgtaatttttaaatatatttatatgtttgtgggttattttatttttttttgaattttttgataataaggattggaatttaattatgtttttttagttttgagtatggtgttgggtataaagtaggtatatagtgagtgttttttggtttattgattgattgattgattaaatttattttttttaaattttttaatgtgagaatatattttttttaaagtttttagttattataaatgatagataagatgtttttttgaatttttaaatgtttattttaaagtttttagttttgtttattagtttatgttattaattggatgagttttagtaaggtttttgttaaagtatttttttttttgttgatttattttaaaatgtaatttagtggttttaagttagaagaagaagaggttatgtttttagtttttttttaagtatttattattagttagttgagaagatgtgattgttatttttttaatttgataagatgattttttttaattataatataagtttagtgagttatataattatggtgaattttttattagtttaatattttatgtaattttttagagaatatgattttatttgaaaatatatgtaatagtttggaatttatttttttttagtgtttaatttttagatttttataaatattagatggttttttaggtagtgatatatgttggaattattgaataagtattgtttatgattttgttttgggtagtgttaaaaggtattgagaatttatttattttattatggtgttgttaatagggttttaggtagtttgttgggtttggaggtgtgttaaattgtagtgttatgaatgttttaaatgagagatagagaaagagaaagagaaggaatatgtgaatgtgtgtttgtagttgagggaaataataagagtaaagggaattaaatttttttaataaaggaaaatagtttttaaataaagaaaaagaagtttaatggttagttattgttgtataataaaatttttttaaaattgagtagtttaaaatagtatatatttattattttatattttttgtgggttaggaatttaggtagagtttagttgggttttttttgttagtattttataaggttgtaattaagatgtaggttagggtgtggttttatttgaaggtattattggggaataatatgtttttaagtttatttttagggttgttggtaggatttagttttttaggggttgttggatagagatattagttttgaattattgattagaggtattttttagttttttgttttgtgagtgttgttatagagtgttttataatatattagtttgttttattagtaagtaaatgagagggtaagagaaagtattagtaaagagagaatgttagtaagatgaaagttatagttaagtatggtggtttatatttgtaattttagtattttgggagattaaggtaagtggattatttgaggttaggagtttaagattagtttggttaatatggtggaattatgtttttattaaaaatataaaaaaagaaaaaaaaatttgggtatagtggtggtgtttgtaattttagttatttaggaggttgaggtaagagaattatttgaatttaggaggtggaggttgtagtgagttaagattgtattattgtattttagtttgggtaatagagtaagattttattttaaaaaaaaaaaaaaaagttataattttttgtaatttaattttggaagggtgttttattgtttttgttataatttttttttttttttttttttttttttttttgtttaagttggagtgtagtggtatgattatagtttattgtaattttatatttttgggtataagtaatttttttattttagttttttgagaagttgggattataggtatgtattagtatatttggtta

SEQ ID NO: 2881 - DNA, 2474 bp, Artificial Sequence
  chemically treated genomic DNA (Homo sapiens)
tagttgggtgtgttggtgtgtgtttgtagttttagttttttaggaggttaaggtaggaggattgtttgtgtttaggaatatgaggttatagtgagttatgattatgttattgtattttagtttgggtaaaaaaaaaaaaaaaaaaaaaaaaaaaaaaattatggtaaaagtaatgagatgtttttttaagattaggttgtaaaaggttgtggtttttttttttttttttgagatgaagttttgttttgttgtttaggttggagtgtagtggtgtaattttggtttattgtaatttttattttttgggtttaagtgatttttttgttttagttttttgaatagttgggattataggtattgttattatgtttagatttttttttttttttttatatttttaatagagatgtggttttattatgttggttaggttggttttaaatttttaattttaggtgatttatttgttttggttttttaaagtgttgggattatagatgtgagttattatgtttggttatggtttttattttgttagtattttttttttgttggtgtttttttttatttttttatttatttgttgatgaagtaagttggtgtgttgtgagatattttatagtgatatttataaggtaagggattgaaggatgtttttggttaatagtttagagttaatatttttgtttaataatttttgagaaattgagttttgttaataattttgagagtgagtttagaagtatattattttttagtgatgtttttagatgggattatattttggtttatattttgattatagttttgtgagatgttgatagagaggatttagttgagttttgtttggatttttgatttatagaaaatgtgagataataaatgtatattgttttaaattgtttagttttagggaaattttgttatgtagtagtagttaattattagatttttttttttttgtttgaaaattatttttttttattaaaagagtttaattttttttatttttgttgttttttttagttatagatatatatttatatattttttttttttttttttttttgttttttgtttgaggtatttatggtattgtaatttgatatatttttaggtttagtaaattgtttgagattttgttagtaatgttgtaatgagatgggtaaatttttagtattttttgatattgtttaaggtaaagttataagtgatgtttgtttgataattttaatgtgtgttattgtttggaaggttatttggtatttataggaatttgaaagttaggtattggggaaaaatgagttttagattgttgtatgtatttttagatagaattatattttttgaaaaattgtataggatgttgagttgataggggatttattatgattgtatggtttattgggtttgtattatggttgagaaaaattattttgttgggttgggaggatgatagttatatttttttagttggttggtgatagatgtttaaggagaggttgaagatgtggttttttttttttttgatttgaagttattgagttgtattttaaagtaaattaataaaaagagggatgttttgataggaattttgttgaggtttatttggttggtggtatgagttggtagataaaattaaaagttttgagataagtgtttggaaatttaaagagatattttgtttgttatttataatggttaaaaattttgaagaaaatgtatttttatattgaagggtttgggggaggtgagtttagttaattaattaattaatagattaggaaatatttattgtatgtttattttgtgtttggtattatgtttgggattggaaaaatatagttagattttagtttttgttattaaagggtttagggaagagtgaggtggtttataaatatgtaaatatatttaaaaattgtaatatagtgaagtgaaggtttgtgttttgtgggagattaaattgattttatttgtagggaattagggaggataaataaaggtttttttgagtaggtaaataaattgggttggtaggtggtaggataaagatttaggggagtagaagatatttttggttgaaggtttggtttgtgtaaaggttttgaggtatgaattagtttggttaggttggaggaattgaaaagttgtgtaaggttgttgggtgtaaggtaggaaagaggttagatagatgggggagtttggtttagaaagagtttgagggttagattaaagattagattttgtttttagagtaatagggagtttgggatgggtttaaatagggtaagtttggttagatttggggtttggaaggatttttatagaggagaggttggaagaggtgagaatgagggtaggttgattaatgttgtaaagatgaggatttttgttttattattattttgaagtatatttattgtttgttattttgtatttttttttttgtattaatagtatttaattttaaa

SEQ ID NO: 2882 - DNA, 2460 bp, Artificial Sequence
  chemically treated genomic DNA (Homo sapiens)
ttttgggggatttatgttttatagaaagtatttagtataatgtttggtatattgtaagttttaagtaaatagaagttgttattattattaattattttttgagatggagttttggtttgttttttaggttggagtgtagtggtgtaattttggtttattgtaatttttattttttgggtttaagtaatttttttgttttagttttttaagtagttggaattataggtgtttattattatatttggttaatttttgtatttttagtagagatggggttttattatgttggttaggttgtttttgaatttttgattttaggtgatttgtttgttttggttttttaaagtgttaggattataggtgtgaattattgtgtttagttaggagttgttattattaatagttattattgttatagttatttggtaaattaagtatgattgttattattttgtagatgataaaattaaggtaataagatgggagtgatttgtttaggtttatttaattgggaattatgtgattagaagtattttttttttattatgtatttttgtttttttaattgggtatgtaagtttatttatttatttatttggtaaatatatatgtttattgtgtgtttggtttgtgtgtgttgtaggtatagattgggttttgtttttatggaaggtatagttttttagggaagagtgatttttattgaatatttatatagatttatttaaaaattataatatgtgttttgtggtatgaagggaaaagtagggtgttgtgagatgtgatttggtttggggtgatttagatggggaagtttttggtgagtttggttaattttttgttgttttggatatttagttattatttttttagattagtttagggttggatgatttttgagagtgtggttgggtgttttttttggtatttttgttttttagtgttggttttttaagttttttttagattttttttttatttagtttttttgaagattgtttttttataattgttttttttattgaaggatttagatataaattgtattttaaatttaatattagttattaatattttatgattataaaatgttaaagataatgttagtggaaggagtgtttgtatgggtagaatggatgatttagaagtttggggagaggggagttggtatattaagtggtttgggagtttttgaggtaatttagtatgataggtggtggtttttggttgagtgtaatattttttgaggtgtttattaagtgttgttgttgtgtataaatattttttttttgatttttgttattttatgtttattatgattaggagtaggtggggttattatgattttttgagttttttttttgtttttgaggaagttaaatggatgttttggtaggagggtatggggttgggtgggtagatttgatggttatgtatttggggttttggttggtttttgggaagttggaggttttgggttaagtttgtttttgttaggatttgttttgtgattttggggttatttttgtttttttttgagtttttgtttttttatttgtaaaatggggataataagtttgtttttattttatggagatggtgaaaaggaagagtgggttagttatttgtggtagttttttttttttgagatagagttttgtttgttgtttaggttggagtgtaggggtatgattttggtttattgtaatttttgtttttgggtttaagtgatttttgtgttttagtttttttagtagttgggagtatatgtatatgttattatgtttagttaatttttgtatttttagtagatatggggttttgttatgttggttaggttggttttgaatttttgaatttaagtgatttgatttttttggttttttaaagtattgggattataggtgtgagttattgtgtttggtttgtgagagtttttgattttgtgttagtattagggaaataggattggaggggtagttgaggagagttgggttttggagttaggtaggttggggttgggaatttggataaatgattttgttttgttgagttaggttttttatttttatagtgaagatggtagtagaatggatattttttaggggtgaagattttatgagtttattataagaaagggtttggaatagagttaagatttatagatattattaattgagtatttattaagtattaattattaggttaagttttttttatgagttatgttgtttgatttttttattagttttttgaagtaaaattatttttttttttattaattaatattttgggtgaggagtgggtaggggttggggattatagtttagagaaggggggttttgagtttagtggttagttttttttttttagagatatatttttttttttatagttagttattggggttgatggatgggatgggggtggggtttagatagtagagagtgtttagaaaag

SEQ ID NO: 2883 - DNA, 2460 bp, Artificial Sequence
  chemically treated genomic DNA (Homo sapiens)
tttttttgggtattttttgttgtttgagttttatttttattttatttattaattttagtaattgattgtggggaaggagatgtatttttgaaaggagaagattagttattgggtttgagattttttttttttgagttgtgatttttagtttttgtttattttttatttaggatattaattaatgggaaaaggaatggttttgttttagagagttggtgggaggattaaatagtatagtttatgggaagaatttagtttagtggttggtgtttagtaagtgtttagttgatggtatttgtaggttttgattttgttttgggtttttttttgtgatgagtttatgaaatttttatttttaaggggtgtttattttattgttatttttattgtggggatgaggaatttgatttagtaaggtgaagttatttgtttaggtttttaattttagtttgtttgattttagagtttggttttttttagttgtttttttagttttgtttttttggtgttggtataaaattaagagtttttataggttaggtatagtggtttatgtttgtaattttagtattttgggaggttaaaggggttagattatttgagtttaagagtttgagattagtttggttaatatggtgaaattttatgtttattaaaaatataaaaattaattgggtatggtggtgtgtgtatatatttttagttgttggggaggttaaggtatgagaattgtttgaatttaaaggtagaggttgtaatgagttaagattatgtttttgtgttttagtttgggtaataggtaagattttgttttaaaaaaaaaaagttgttataaataattgatttattttttttttttattatttttatgagatgggaataaatttattatttttattttatagatgaggaaatagaggtttagggaagaatagggatggttttaagattatagagtaagttttggtaggggtaggtttgatttaagatttttggttttttaggagttagttagagttttaggtgtatggttattgggtttgtttatttagttttatgtttttttgttaaagtgtttatttggtttttttaaaaatagaagggaaatttagagggttatggtggttttatttgtttttggttataataaatatgaggtgataagaattagaggggaaatatttatatatagtggtggtgtttggtgagtattttggagaatgttgtatttagttaggagttattgtttgttatattggattattttaaagatttttgagttatttagtatgttggtttttttttttttgaatttttgagttatttattttgtttatgtagatgttttttttattgatattatttttaatgttttgtaattatgaaatattaatgattgatattgaatttaaagtataatttgtgtttgaattttttggtggaaagggtagttgtaaagggatagtttttaaagagattgggtggggggggggtttaggggagatttggaaaattaatattgggaggtgggagtgttaaggggggtatttagttatatttttaagagttatttagttttaagttgatttggaggggtaatagttagatgtttaggatagtaaagggttaattagatttgttagaagtttttttatttgggttattttaggttaagttatgttttatagtattttgtttttttttttatgttatagagtatgtgttatgatttttagatgggtttgtgtgagtatttagtgaagattgtttttttttgggaaattgtattttttatgagggtagggtttagtttatatttgtagtatatataggttaggtatatagtaggtatgtgtgtttattgaatggatgaatgaatgggtttgtatgtttagttggaaaaataggaatgtatgatggagaagaaatgtttttagttgtatggtttttagttgggtgggtttggataggttatttttattttgttattttggttttgttatttataaaatggtgataattatatttagtttattagatagttgtgataatggtaattattaataatagtagtttttggttgggtatggtggtttatgtttgtaattttagtattttgggaggttgaggtaggtggattatttgaggttaggagtttaagagtagtttggttaatatggtgaaattttatttttattaaaagtatgaaaattagttgggtgtggtggtgggtatttgtaattttaattatttgggaggttgaggtaggagaattgtttgaatttaggaggtggaggttgtagtgggttgagattgtattattgtattttagtttgggagatagattgagattttattttaaaaaataattaataataatagtagtttttatttatttaaagtttataatatgttaggtattgtgttgagtgttttttataaaatataaattttttaagg

SEQ ID NO: 2884 - DNA, 2410 bp, Artificial Sequence
  chemically treated genomic DNA (Homo sapiens)
tttttatggtataaagttatttaaaaaaaaaaaaagaatagaggggagttagagggaggggataaggggtggagggtggagttgttagagttttatggggtataggagataaatggatatgtattggttggaaaggatagaagttgtgatttttttagttatttaattggggaaattttagaataggaggtttttgagtttttattagttgataagtgataaaagttgagagtaataatgataagtgttaatattgattaagtgttaggtatatgttaggtaattatatagagtatgttataggtatgaatttatttgtttttttaagaagttttttgaagtggtattgggagataattttttatgggtttttttaaggtttgtatgtttttagtttaaaagatattgagatttttgttttagattattattttaaggatatttgtgtagtaaatatatttggaggatagagataatatttttttttggagtagaaagaagaggatagagttgttttttaattagtataataatgtttttatttgaggtaaaggttagataggtttggtaatagtttttttataagattgtaggttttttaagttttgggattttttattgagatatagatttgttgttgtgtgtgtagaatttatttgggttgtttttattgtttttatggaatttgggagataattagaattgatgtaaatatgaagtttgtgttgtttgttatattgtgattaataaagttttttgtttttgatttgggattttgtgttttttgttgttatgtatggtattgtggtaggttaatttattagtttgtgagtagtgtaaaattttggattttttgtagtttttttgttatatttatattatttttgttttatagatgaggattttgaggtttagagaattgaagttttttgtttaagattatatagttaataagtaataaagttaggattgttatttagattgattgggaaaggaaggagagatgagtaggggattggagaagagaattgttggaaatgataggagttgaaggttttaaaggtatatagaaggttatgttttttagttttttaaatttatatatttttagatgttgtttgtttttatatttggttgttggggttgagtagttaatttgggatgattgtgatatatttaatggtgagttatgtttttttttagtaattagtagtggtaggtttgggaggatgtagggagtatttttggaaatttgtgtttgagggttgttatgataatgttatttgagttgtttgttagtagttgggatgttagtgtttgaattaaggtataaaatagttttataggttgagtgtggttgaggataggagtaggttttttgtatggtatttttaatgggtttgttagggattgatgggagggatgtgaggatttggtgataagggagatttatgggtttattgtttaggttatagtattttatggaagtttggggtttttggttggtgggaatgagtatatttggtgtgatgggtattttggtgagtattatttttttttgttttggttttttttggtttgtttgttttatagttgtttttttagaggttttgtttaatttgaggtttttatttaagtgttataatttttgaagattgatagtaatttgggaaggtaattaagattattttttaggataattttgaagattttagaatttagggtgaattagttatatttatatattaatattaaatatgaatattttatgaaagtagtttggaatttatttatttatttataaatttatttattattttgtttttttagttgtttattttaattagaatttgggttttataggttttatgtagaagtggatttggttattttgtttttatttttttttatttttttttttttattttattttagtttattagttttattgttgttttttaaatatatagttgtttttttgttttagagtttttgtatttgtttttttatttgtttggaaagttttttttttagaagggaagttttttttttaggtttttgtttatatgttatttttttagagatatattattaagattattttaggagaaagtatttaatttagttttagtgataaggttaaatatatatatatatatatattatgtataatatgatatatatttgtgatttagttttttttatttgtatgaagtaaagagagataagttgaaaattggtggtttgtaagttgaatttaatttatagatttgttttgtttggtttatatagtgttttaagaattgagtaagttgttaatagttataaagttgagagattttgttttagaatgtaaatttttaatttattttgaaaaattaaggttgggtgtggtggtttatgtttgtaa

SEQ ID NO: 2885 - DNA, 2410 bp, Artificial Sequence
  chemically treated genomic DNA (Homo sapiens)
ttataggtatgagttattatatttaattttagttttttgagataaattgaaaatttgtattttaaaataaaattttttaattttataattgttagtaatttgtttagtttttgaaatattatgtaaattaaataaaataggtttgtgagttagatttaatttataggttattaatttttagtttgtttttttttgttttgtatggatgggggaaattaagttatagatatatgttatattatatataatatatatatatatatatatttggttttattattgaggttgaattaggtgtttttttttagggtggttttggtagtgtgtttttgagaaggtgatatatgagtagaaatttaaagggagagttttttttttgggggaagagttttttaggtagatggaggagtaagtgtaaaggttttgaggtagaaaagtaattgtatgtttgaggaatagtagtaagattagtgagttagagtagaataagagagggggagtgaaaggggatgaggatgggataattaaatttatttttatatagggtttgtaggatttaggttttaattaaaatgaataattgagaggataaggtgatgaatggatttatgaatgaatgaatggattttaagttgtttttatgggatatttgtatttggtgttagtgtgtgggtgtggttgatttgttttaggttttgaagtttttagaattattttggaagatgattttggttatttttttaagttgttgttagtttttagaggttgtgatatttggatagaagttttaaattgggtagggtttttgggagagtaattatgagatagataaattaagaagaattaaggtaggaagagatggtgtttattaaaatatttattatgttaagtgtgtttatttttattagttagggattttaggtttttatagagtattgtgatttggatagtgagtttatgaattttttttgttattaagtttttatattttttttattaatttttggtaaatttattggggatgttgtgtagggggtttgtttttgtttttggttgtatttagtttgtgagattattttgtgttttggtttaggtattggtattttagttgttggtaagtgatttagatggtgttgttatggtgatttttaggtatggatttttagagatgttttttgtatttttttgagtttgttattgttgattgttgggggagagtatgatttattgttaaatatattatggttgttttaaattggttgtttagttttagtagttggatgtagggataggtagtatttgggggtgtgtgggtttgggaagttgagaggtatgattttttgtgtatttttggggtttttagtttttgttatttttagtggtttttttttttaattttttatttatttttttttttttttttaattggtttgggtaatagttttagttttgttatttgttagttgtgtgattttgaataagaagttttaattttttgggttttaaagtttttatttgtaaaataggggtgatgtgagtatgatggaagaattatgaagggtttgagattttgtattgtttataagttaatgagttagtttgttataatgttatatatgatggtagaagatatgagattttaggttagagataaaggattttattagttatagtatagtaagtagtataagttttatatttgtgttagttttaattgttttttaagttttatgagagtaatgaaaataatttaaatggattttgtatatatagtagtagatttgtgttttaatggaggattttagagtttaggaaatttgtaattttataaaggggttattgttaaatttgtttagtttttgttttagatagagatattattgtattggttgggaaataattttatttttttttttttgttttagagagagatattgtttttgttttttaagtgtgtttgttatatagatgtttttgagatgatagtttagaataaaggttttagtgttttttgagttgaagatatgtagattttggagagatttatggagaattattttttaatattattttaaagggttttttggaggagtagatgggtttatatttgtaatatgttttgtatagttgtttggtatgtgtttggtatttaattagtgttagtatttgttattattatttttagtttttattatttgttagttagtaggaatttagaggttttttgttttgggatttttttagttaggtgattaagaaaattatagtttttattttttttagttagtatatatttatttattttttatgttttatgaagttttaataattttattttttattttttgttttttttttttgatttttttttgttttttttttttttttaaatagttttatattataaaaa

SEQ ID NO: 2886 - DNA, 2489 bp, Artificial Sequence
  chemically treated genomic DNA (Homo sapiens)
aaatggttattaaattgtttaatttaaatggttggtttatggatatgttttgtttggtttatgtttgtttaatttttaaaaaaaaattattatttgtattttttgttaataataaaaataattgggatagtgtgttttaatttaaattttttatttttttttggtaattagaaggtttgatagtattgtgtttatttttttgtatggtagttatttataggagttgggtagtggttgttttttttgttaggatataagtgttttattttattttagtgtttttttggttatattatttttgtatagggttgtttggttttagtttagttgatgggatataggtgtgagtagtgaggttatgtagggattataagtaggatatttttttttttttttggaaggaagtattttggttattatagtaatatgttgttgtttgtaatatattttttatttgaaaaggagaggagatgataagtatatttttttttttagtttaggtaatattagtttttggtattttttaaaatttaagagtgagaagggggagtgtgatttgttttttttaatttgggttttaaatgtagatgttttaaatatttttatttgtttaattaatttagagatgaggtgttgggaggggttgatttagattttattttatataaaaagattagaatatttttgattagtgatggaggaaggtgtgggagtttgagatagtgttttgtttttgggtaaatgtatatattttttgatgttttttttttttttatgttttttaaagtagaagtatagattttttttttttattattttttatagttaaattttttttagttaggattttagattttttttaatatttaggagtttttagggtagtaggtttgtttttaggttatttatagaatttgaaggaaataagggaatgaaataagagaattagttagaaataaggtagggtattgtgtggtatttttttttgaaattaagaggttgagagttggaatagtagtagaaattagaagaaattttattgagaaaagaggtatagagaggagtgttaattagtatttaggtttttttttgggagtgttaatttataaatattaataattgtaattatttagtattagttataatgttttgtaaattaaggttattttttgtggagtaaatagttgtgttaatggtagtaaaaggtaatggtgttgttggttgtatgttagttgatgtttgttaggatgatagtataaattaggaaggatatgtttaatttgtgaagataggtagtggtatgggggtaggtggagtgatggggtagagtgtggttgtagatatatattttatgtaaggtttttgggttgatttgatttaatagggatttgttttagataggtgatgtttggggtagatgaagtttttagggttattaggtgtaggtaggaggggagagaaggggttgggtgggtagggagagggtgttttagagggaggtggtattaagattttagatatttgggttaagagtagagggttatgttttgagttgttgtttgtggtattttattgtagattttggtgtttttgttaagtgatatagatatttttttttttttttatttttttttttttttttttatttttttttttttttttttttttttttttgttagggttgatttttttattaggtttaatagatatagtttggggtttatattatttttagggttttttttttaatgttttaattttttttataattagaagaaaaaaagaatttttagtaggaagaaaatgttgtaatattgtatgtgatattaatatatttatttttatattaatgtagttataatatagtatgtttgttttttttttatggagagaggtttaagtgtttgggggttataaaatttattatatggttttattttttgttttttatttttttttttattaattatggggttttaagtaattagtattgttttatggagttttggttttattttttgtaaatgggttaataatggtgatgtttttttaagtaggatgaagtaaaataatattagaaaaagttttggttataaagtggtgtttgttttttttttaggaggttttgggattttgggagttaggtgggtgatgtatttgaaaattttagtggatggagtttttggtaatgttttttatgggttttttaagttaaatgtattgttagattttttttttgggtttgatttattatttttttgggttttttggtttttttaaagagtaaatgttttttttgattttttgagaaaatttataaggtatttgagtatattagatggattaaataatgtttttaaattttaatggaaagaaagtagttattatgatgggttttagtaaggggagggagttgggggtttttttgtttttttattgttgggattggatatattggggtttgtaatatttagtgtagatgaaaatgt

SEQ ID NO: 2887 - DNA, 2489 bp, Artificial Sequence
  chemically treated genomic DNA (Homo sapiens)
atatttttatttgtattgggtattgtaaattttagtgtgtttagttttagtagtaaaggaataaggaggtttttaattttttttttttgttggagtttgttataatggttgttttttttttgttggaatttaaaggtattatttgatttatttagtatatttaagtgttttgtgagtttttttagagggttaagaaaagtatttgttttttagagaaattagggagtttaggaagatgatgggttagatttgagagaagggtttgatggtgtatttagtttggggagtttatagggagtattattagggattttatttattgagatttttaaatatattatttgtttaatttttaggattttagagttttttgaaaaggaggtaaatattattttgtggttaaagttttttttaatattattttattttattttgtttgggaaggtattattattattagtttatttgtaaaggatgaaattgagattttataaggtaatgttaattgtttagggttttgtggttagtgggaggaggggtggggagtagaaagtagggttatgtgatgaattttgtggtttttgggtatttaggtttttttttatgaaaaaaaaataaatatgttatattatggttatattggtataaagatgaatatattaatattatatatagtattataatattttttttttgttgaaagtttttttttttttttaattataaaagaaattaaaatattggagaaggggttttagaggtagtgtgaattttaggttgtgtttattgggtttaatggagaagttagttttggtaggaggagaggagaggaagagaaggaagatggagaggagggaaaggaggtagaggaagaagagaatgtttgtgttgtttagtaaaggtgttaaggtttgtagtgaaatgttataggtagtagtttaaagtgtggttttttgtttttaatttaagtgtttgaagttttggtgttatttttttttgagatattttttttttatttatttggttttttttttttttttttatttatatttagtgattttgggagttttatttgttttagatattatttgtttaaagtaggtttttgttagattagattggtttaagggttttgtgtgggatgtgtgtttgtggttatattttgttttgttattttatttgtttttatgttattgtttgtttttatagattggatgtgttttttttgatttatattgttattttggtaggtattaattggtatgtagttagtaatgttgttattttttgttgttattaatgtagttatttattttatggaaaatgattttaatttataaggtattataattaatattggatgattatggttattaatatttatggattgatatttttaggaggggatttgggtgttaattggtatttttttttgtgtttttttttttaatgagattttttttgatttttgttgttgttttagtttttagttttttagttttaaaggaaaatattgtatggtgttttgttttatttttggttgatttttttattttatttttttattttttttaggttttgtaggtagtttagaaataggtttgttgttttaggggtttttgggtattgggaaaggtttggggttttggttgaggggaatttggttgtgaggagtagtaaggagagggagtttatgtttttattttagaggatgtggagagaagagaggtattagggaatgtgtatatttgtttagaaataaagtattgttttagatttttatatttttttttattattaattaaaaatgttttggtttttttatataagatggaatttaaattaattttttttaatgttttatttttgggttggttgaataaatgggggtgtttggggtatttgtatttggggtttagattggagaagatagattatattttttttttttgtttttaggttttggggggtgttaggagttgatgttgtttgggttgagaagagagatgtatttgttatttttttttttttttaggtggaagatgtgttataaatagtagtatgttgttatggtaattaaggtgtttttttttaagagagagggagagtgttttgtttgtggtttttgtatggttttattatttatgtttgtgttttattagttgggttggggttaggtagttttgtataagagtgatatagttaggagggtattgggatgaaatggggtatttgtattttgataaaaggagtagttattgtttaatttttgtaaatagttgttatgtagaaaaatgggtataatgttgttaaattttttgattattgaagagaagtgggaaatttggattaaggtatattgttttaattatttttattgttggtaaagaatgtaaataataatttttttttaagaattaaataaatatggattaaataaaatgtgtttatgaattggttatttgggttgggtagtttggtagttattt

SEQ ID NO: 2888 - DNA, 2494 bp, Artificial Sequence
  chemically treated genomic DNA (Homo sapiens)
gtagtttgttttttagttaaatgggttggagttggatatgggaaaggtgtaattaatattttgttgtgggggttaggtgtgaaggggtttatttggttatatttttttttgggtttgttttttttttagttagataggatgttgttagattttttgtttggttttgaatttttttttgagaatttttttaaaatttaggttgatgttttttttttgtgagttttattttttttattttttagatgggtatgagaatagtttttggggtttttatataggttaaatgtaggaatgtatatgggaagtatttggtaaagtgttggtatttgttaaatttttataaaaatggttttttggtatttgttttgtttttttgttgtgtgattttgggtaagtaatttaatttttttgagttttaggggaaaattatgatagtatatgttttagagagtggttgtaaaggtggttaattattttatagtaatttattatatttgaatggtttttaggttggtttttttatttttattgaattttagtatatagattaggaaatggtatttttggggtagaaaatataattatgttttttgaaaatttattaaatgtgtaaaaaattttttggatatggagaaaaggtagaattttttagaatttgaatggtggtagttattgtgtttggagttgttttttggagagtgatagttgagggagaagattttatagggtttaagttggttaggttttgttattttttggtttggtgtttgatttttgagtggtgagggttagtgaggtgtttgggaggattggtaatttgtgggttttattggtattttatttgattaaggttatttatttttttttttttgtgtattaattgttttgattttaatatgtaaaggtttaattgtttggttttttgggtgtttgtttagtttatagggttttattttgggatagttgaattttttagggtgttgtagttttgtttgttttttttattttttatttggatattattttaatgtaaaggtatggttgagatatagaaatttttttgaaatgtattattgtggtttttattgatttttattgtgtgttttaatggtgggtttagtgggtgggggttgggaggggtggagtaggtgtatggggtagtggtgtttagtatttgttttagttatagttgttggtttattgtatggtaggtttttttaatttggggatattgtatgtatagtgttttttttggtgttttttgtttttgttggtttggtgttgattttatatttgttaggagtattatgaaggtgtttggggggtgagggatttaaggagtgggggtttgtgttttttgtgtgtgtatatagtttttgtttttagtttattatgttttagaatgtttttttttttttttgtttgggtttaggttttattatattttgggtatttattgtataggagggtagtgtttaggattttattaatagttttgggaagggaagggaggtgttgttttaattttggttttataaatggattttagttttttttttagatttttagagttagtttttagtttataagggtgaatttattttttttatttatatgaagatttagaatgtaattaataaattttttaggtgtggtgtgtggaggttgttgagtaatggtagagtggagtagtgtttaggtattttttttttaattttttatgttttttattttttggagtggtgagtttttatttttgttttatgagattgagtttagtttttaggtgttttataagtttttattgaatgtatgggttttattggagttattttttggatttttttttattttggtagtttagtgtggtattttaggtatttaggaggtgatggaatgaatttatttttagtttttaaattttatttagtgttgggattttataggtgggttttgattttgtgggtatattagattgggtgtgaggggattggagaattgtatgttttttaaaaagattatttagtattatggaatagtgtttagtatttagtaggagtttagtagattaaaaaaaaaattatagatagggttttgttttattgtttaggtttgttttaaatttttggttttaagtaattttgttttatttggttttttagagtgatgggattataagtgtgagttattatatttagttttaatagatttttgtttaatgggttattgttatgattttttatttggaaaatgttgtattttttagaaaaaaataaattaatattattggtgtttttggaattatatagttttttggttggagtagggattgttatgaggtatgagtgagggggtagatttttttgaggtttttttaatttttaaaatagatttatttattttttaagggtttgttgaggatttattgggtatttagttttatgtgtaagattttttttaatatagttttggttaggtagatggtgtgttaggg

SEQ ID NO: 2889 - DNA, 2494 bp, Artificial Sequence
  chemically treated genomic DNA (Homo sapiens)
ttttgatatattatttgtttggttaaggttgtgttgggaaaagttttgtatatggagttgggtgtttagtaaatttttaataagtttttagagaataaataagtttgttttaaaaattaaagaggttttagaggagtttgtttttttatttatgttttataataatttttgttttaattaaaaagttatatagttttaaaaatattaataatgttgatttgtttttttttgggggatgtagtattttttaaataaaaggttataatagtaatttattaaataaaaatttattgaggttgggtgtggtggtttatgtttgtaattttattattttgggaggttgagtgaggtaggattgtttgaagttaggagtttgagataagtttaggtgataaagtaagattttgtttataattttttttttaatttattgagtttttattaagtgttagatattattttataatattgaatagtttttttaaaaaatatgtaattttttaatttttttatgtttagtttgatatgtttgtaaggttagggtttgtttgtgaaattttagtgttggatggaatttaagagttgagagtgaatttattttattattttttgggtgtttagggtgttatattgagttattagggtaggagagagtttagaggatggttttaatgggatttatgtatttaatagggatttatggagtgtttgagagttggatttagttttatggggtagaaatggaaatttgttattttaaagggtgggggatatagaggattgggggaggggtgtttgagtattattttattttgttattatttagtagtttttatatgttatgtttgaagggtttgttgattgtattttaagtttttatgtgaatgagaagggtaagtttatttttgtgaattaagggttgattttggagatttggaaaaggggttggagtttatttgtaagattagagttaggatagtattttttttttttttttagggttgttggtgaagttttgagtattatttttttgtatagtaagtgtttaaagtgtgatgagatttgaatttaaataaaaggggaaggagatattttaggatatgatgggttgggggtgggggttgtgtgtatatgtaggaggtatagatttttattttttggattttttgttttttagatgtttttatggtatttttggtaagtgtgaaattggtattaggttggtggggataaagggtgttgaggggggtattgtatatgtgatatttttggattaaaggggtttgttatgtagtgggttagtagttgtgattggaataggtgttgggtattgttgttttatgtatttgttttattttttttagtttttatttattgggtttattattaaggtatataatgggagttaatgaggattgtaatgatatattttaaggggatttttgtgttttagttatgtttttatattaaaataatgtttagatgggaggtgagagaggtaggtaggattgtagtattttgaggggtttaattgttttaaaatagagttttgtgagttgggtaggtatttaggaggttaggtagttggatttttatatgttaaaattagagtaattggtgtatgaaggaagagaaatgggtagttttagttgaataagatgttaataaagtttgtgaattgttagtttttttagatattttattaatttttattgtttagaggttaggtgttaggttaggaaatggtagaatttggttagtttgaattttgtggaatttttttttttaattgttattttttaaagagtagttttaggtatagtggttgttattatttaagttttaaaaagttttattttttttttatgtttagaaagttttttatatatttagtaaatttttaaaagatgtgattgtgttttttgttttaaagatgttgttttttggtttgtgtgttaggatttagtgggggtggggaagttgatttgagaattgtttgggtataataaattattataaagtgattagttatttttatagttattttttaaaatatatgttattatagtttttttttaaggtttagagaggttaagttgtttgtttaaagttatatagtaaggaagtagagtaaatgttaaggaattatttttgtgagagtttagtaggtattggtattttgttaggtgttttttatatgtatttttgtatttagtttgtatagaaattttaaaagttgtttttatgtttatttgaaagatagagaaaatgaggtttatagaagagaaatattagtttaagttttgagaaagtttttaaagaaggatttagagttaggtggggggtttgataatattttgtttggttagggagggggtggatttgggagagggtgtggttgggtgggtttttttatatttggtttttatagtaaggtgttggttgtattttttttatatttagttttgatttatttggttgagaaataggttgt

SEQ ID NO: 2890 - DNA, 2472 bp, Artificial Sequence
  chemically treated genomic DNA (Homo sapiens)
attaaaggtatgagttataatatttagtttatgatggattttgagttaatttatgtttgatgtgtgtgaagggttaatgtttttttgttttttaaattttttttgtatggttatttaattgttggtgtattatttgtttaaaagagtttttttttttgtgaaattattttggtggttttgttgggtattaattagttgtttgtgtgtggttttgttttttgttattttgttttgatgttttttttttgttgatattattttgttttgatttttgtgtgttttaagtgaattttgaaatttggtagtgttagttatttgattttattttttttaaaattgttttggtttttttaggttatttgtatttttttatgaattttagaatttatttgttatgtaaaaaaaaaaaatttgttagaattttgattgggattgttaaaattatttttaaaaattattgaagttgattttgaaatgtagtatgtaagggtttgggtgtgtaatttgtatgtgagttttagtgtataaaagaaagtgagagttagtaagttgggttagaggggataaaggagagagtggtggtgtatgtgtttaggtttttgttggtttttgagagtttttttttttttagagtgattatagggtgggtaggaggttttttaggatttttggagggtgtgtttttttattaataatgataaagggtgtgatgtagattttttaattttattatatgtgaaaagagtgtttattgttgaaaggattaaataagataagatgttgagtagttgagttgtaaatgtttgtggattgaagtttaaagttagtttatatagatttatttatttgtttattttttgttgtggttttttgtgttttagttattattattgttttatggtgtatggttgatgtgttgttttgtaaagggttaggtgttattttttagtatgtattattttttattggttttgtttttggggtttatgatatatattatttggttatttttattttggagtattataggttaaattagttagtaatttgtggaattaatttatgagtggtgtttatttttggataatggtttagtggaggggttggtttgtagtttatatttattatggttttgttgaatggtgtttgttagattttgtataattgaatttagtttagttttatgaaggttttgtataagttagttttttttttttgttatttgatggaataatagatttataggagaatttatttgtaattttaagttttgagttaaagatgttttaagggatgaatgtgggtgatttgtggaatattgtgatgtatttatgagatagattgtatgtttattgtggtgtttaaagaaattagattgggttgtattagaggtggtgttgtaatttggttgttttttgggaaagaatgtaagtttttagtgtgtgaagtatgaggggttgtagaggaaattgttttggtggttttggttttgggagtaagtatttgttttttgtttatttaagtatattagtgagttttataaatatttaagtggtttatgagatgttttatttttaggttttgttttattttttttgttgttatatagaggttattagaaattatggttttttgggtttgatagttaggtagataggattaggttaggttgtagttgttaatttttgtgttggtaatttttagattttttgtataatgttattgtttagttatttttttttgggttgtttgtttttatggggtttttgtaattaaaaaaaataataatttatttttattttttttttttaatatgttttattaataattgtgtaaatttgtttattttttaggattttattatgatgtaaagtagataaaataattaatttgttttttttttttttggtatatgggtgttttgtagtttttattttttttaatttttgttttatgtttatgagtatgaagttgaattaatttatgttttgttgaagttggattgtgagattgtgtaggtagatgtggttttttttttgagtttgtaaagtagtagaatttatgataatgggttttgtagtaatagggattgattgtgttatgttgtttttgtttatttttatagtgtttaggagtttgtatgttattattgggattattttatagaaaatagaggtttttaggggtaatgtaatttgttttaggataggtagttataaggtagagaaaggagggttggatttgtatttgtgaaattatagttttggggtatggtttttgagatttatagttggggttgaagatttttaggggggttttgttgggtttattgttttttagagtggtttagtttggttgtagggtgttgtttttagtttggtgtattgtggttggaggaggtggaggatggaaagtaagatttaaagatagggagtgtaaggggatagtgatatttgaggattttgaggagga

SEQ ID NO: 2891 - DNA, 2472 bp, Artificial Sequence
  chemically treated genomic DNA (Homo sapiens)
ttttttttggagtttttaagtattattgtttttttgtattttttgtttttgaattttattttttattttttattttttttggttgtagtgtattaagttggaagtagtattttgtagttgggttggattattttggagagtagtgagtttagtagagtttttttagggatttttagttttagttatgagttttagaagttatgttttagggttgtggttttataggtgtaggtttaatttttttttttttgttttgtggttgtttgttttggggtaggttatgttgtttttgggagtttttgttttttgtaaaatggttttagtaatggtatgtaaatttttgagtgttgtaaggatggatagagatagtatggtgtagttagtttttgttattatggaatttattgttatgaattttgttgttttgtaggtttagaagaaaagttatgtttgtttatataattttataatttggttttagtaaagtatgagttaatttaattttatatttgtgaatgtgaagtgggggttggaaggaatgaaggttgtaggatatttatgtattaagaaaaagaaagataaattggttgttttatttattttatattatgatggagttttaaaaagtaaataaatttatatagttattaataagatatattaaaagaaaggagtgagaataagttgttgttttttttaattgtaggggttttatgaaggtaggtagtttagggaggaatgattggatggtgatattgtgtagggggtttggaagttgttagtgtaggggttagtagttgtagtttggtttggttttgtttgtttggttgttaaatttagaagattgtggtttttggtggtttttgtgtgatagtggaggaggtggggtgaggtttggaagtgaagtattttgtgagttatttaagtgtttatgaagtttgttaatgtgtttaaatgaatgagaagtaggtatttgtttttaggattagagttattaaagtaattttttttgtagttttttatattttgtatattggaagtttgtatttttttttagaggatagttggattatagtattgtttttaatgtaatttgatttggtttttttgagtgttgtggtgaatgtgtaatttattttataaatgtattgtagtgttttataaattatttatgtttattttttgagatgtttttaatttggggtttagagttgtaaatgaatttttttatggatttattattttattaaatagtggagagaggggattagtttgtgtagagtttttatagagttgggttaaatttgattatgtaaagtttaatgagtattatttagtaaaattatggtgggtgtgagttgtaggttagtttttttattgggttattatttaggggtaaatattatttgtgggttagttttatgagttattggttgatttgatttgtgatattttaaggtggaagtaattaaataatatgtattatgagttttaagaatgaagttagtggagagtggtatatgttagagggtaatgtttggttttttgtaggatagtatgttagttatgtgttatgggatgatggtggtggttgggatataggaggttatggtaggaaatgggtaggtgggtgggtttatgtaagttggttttagattttaatttataagtatttgtagtttaattatttagtgttttattttatttaatttttttagtaataaatattttttttatatgtagtaaggttaaggagtttatattatattttttattattattaataaagggatatattttttagggattttagggaattttttatttattttgtggttattttagggaaaggaaagtttttagggattgatgggagtttgggtatatgtgttattatttttttttttattttttttagtttggtttgttggtttttatttttttttgtgtattagaatttatgtataagttgtatatttaaatttttgtatgttgtattttagagttaattttagtgatttttgagagtgattttgataattttagttaaaattttagtaggttttttttttttatatgataagtggattttaaaatttataggaaaatgtaaatgatttagaagagttaaagtaattttggaaggagtaaagttgaatggttgatgttattagattttaagatttatttgaaatgtataggaattaagatagggtggtgttgatagaaggaaggtgttagagtagggtgataggaggtagggttatatatagatggttgattgatatttgataaaattgttgaggtaattttatagggaaaggaatttttttgaataaatggtgtattaataattggataattatatggaaaaaatttaaaaaatagaagaatattgattttttatgtatattaaatataaattaatttagaatttattataggttgggtgttgtggtttatgtttttaat

SEQ ID NO: 2892 - DNA, 2474 bp, Artificial Sequence
  chemically treated genomic DNA (Homo sapiens)
ggatttgattagtttttgttaaattgagtatataagtgaggatgtatttaaaggagtgttagtgtattttttataaattttaaatgtagggtaagttggtttatgttattgttgaaaagtagtgtgtgtttgaggaagggttgtattatattgggtgtggatggaattatgtttttttgatgtgtagattttttgaatattttatttgtagaatttgtttttaaataaatattattattattaggttagtgaaatatttttatattgtttatgtttattatttgttgtgtaaatatttgtggttttaaaagaataatagattgtgagaattttagtaaaatgattgtagaattaattatttttttaagtagaagtgatatttttaataggtttatttagatggttttagtttttgttttggggttttatattaaattttatttaggttgtttgtagtgaggggtagaaggttgtgttatagagatttaaaggtaaaatgtggggtgtttgtttgtatttagtggagttttatttatgattagtgatttttagagataggtaagggtgttaggaggtttttgggatgtattgaagtagttttttttaggaaataagtggtaaagaagaattttaattttttttatgttgataaaaaaatatatatgtgtgggaatgtatgttttgggtttgagtattgattttttttttgtagttttttggttttggtattgttggttttaggggttgaattattttatggtgggggttgttttgtgtattgaaggttgtttaatagtgtttttggttgttattttttagatgatttttaggtgtattttttttttttttttttatttttaggtatgtgaattataatgtttttagatgttgttagtgtgttttggagattaaagtaatttttgattgagaattgttgtttaggaagatatattttttatttgtttgttgttttttaatgtaatttatagttgagagatattttgttttatttaggtgtgaagtattttgttttatttggaaggttgggtatatttaaatattatttttttgtatgtttatttgttgtagagtggttaatgttttttaattggtgtagtaaatattttagagttttttttgttatgttggagttatttagaaattagttttgaaatgtggttgttattttagggattattatatattatttgttgtttggtgttaaattttgagttgttgttatttaatattgattaataaatggtaggttgttagtattggtagtgaagatattttaaggagttattgtttttttaaattaaaatatttaaatatttaaatttagggttggtttttatggtttgttttaattattttttttgttttggtatatttttttttttttgattatatagttgttatgttagtagtatttggagttggaatatgatagttttttttttattagttgttattatttttgtaaggaaagttggaagttgttggagtagatgttaattttgagagaagattgttggttaagttattaaaatgagtgtatttgaaggttgtgatttatatgatttatatgtgggtagggtttgtaggattgggttttgtttggttttgtatgtgtgtgtgtgtgtggatttgtgtatgtgtgtttttttgtgtggtgtgtttgtgtatttgtttgtttttgtgtgtgtgattgtgtgtatttttttatgtgtttatatttttgtgtgtttgtgtatgtgtttgtgtgtgtgtatgtttgtatttttgtgtgtgtgtttttgtggatatttgtgtgtgtgtttgtgtgtgtatttgtgtgtgtgattgtgtgtatttgtatatgtgtttatatttgtgtgtgtttgtatttatgtgtgtgtatttttgtggatatttttggttgtttgtgtgtgtgtttgtgtgtgtatttgtttgtgtgattttgtgtgtgattgtgtgtatttttatatgtgtttttgtatgtttgtgtgtgtatgtttgtatttatgtgtgtgtgtttttgtggatttttttatgtgggtgtttgtgtatttgtatatggttgtgtttttttttgtgtattttgtgtgtgtttatgtgtatttatgtgtgtgtgtgtatgtgtatgtatgtgtgggtttttttgtgtatgtatttttgtgtatttgtatgtgtgtttttttgtgtgtgtttgtgtatatttttgtgtttttgtatgtgtgtgtttatgtgtgtttgtgtgtgtatttgtgtgtatttgtatatatgtgtatgtgtgtgtgggtttttttgtgtgtgtatttgtgtgtatttgtatgagtgtttttttgtgtgtgtttgtgtatatttgtgtgtttttgtgtgtgtttttgtgtatttgtatgtatgtgtatttttgtgtgtttttgtgtatatttgtgtttgtgtgtatatttgtgtgtatatgtatgtgt

SEQ ID NO: 2893 - DNA, 2474 bp, Artificial Sequence
  chemically treated genomic DNA (Homo sapiens)
atatatatatatatatatagatatatatatagatatagatgtatataaagatatataaagatatatatatatatggatatataaaaatatatgtagaaatatataaatatatatagatatatatagagaaatatttatgtagatatatataaatatatatataaagaaatttatatatatatatatatatatatagatatatataaatatatatatagatatatatagatatatatatgtagaaatataaaaatatatatagatatatatagagaaatatatgtgtagatatataaaaatatatatataaagaaatttatatatatatatatatatatatatatatatagatatatatgaatatatataaaatatataaagagagatatagttatatatagatatatagatatttatatagagagatttataaagatatatatatatagatatagatatatatatatagatatatagagatatatatagagatatatataattatatatagaattatatagatagatatatatatagatatatatatagataattagagatatttataaagatatatatatatagatatagatatatatagatatagatatatatatagatatgtataattatatatatagatatatatatagatatatatatagatatttataaagatatatatatagagatatagatatatatatatatagatatatatatagatatatagagatatagatatatagagagatatatataattatatatatagagatagatagatatatagatatattatatagagagatatatatatatagatttatatatatatatatatatagagttaagtaagatttggttttgtaggttttgtttgtgtataaattatatgagttgtagtttttggatgtgtttattttaataatttagttagtagtttttttttaaaattaatatttgttttagtagtttttagttttttttgtgaaaataatggtagttaatagggaaagggttgttgtgttttgattttaggtattgttggtgtgatagttgtgtgattaggagaagaaaggtatgttaagataaaaggaataattaaaatgagttatgagaattagttttggatttaaatgtttaaatgttttaatttaaaagaataatggttttttgaagtgtttttattgttggtattgataatttgttatttattaattagtgttaaataatagtggtttagggtttaatattaaatagtagatgatgtgtgatgatttttaaaatagtagttatattttagggttgatttttaaatgattttggtataataaggaagattttggaatatttattgtattaattaaagagtattaattattttgtgataaataagtgtgtaggggagtggtatttaaatatgtttagttttttaggtaaagtgaggtgttttatatttaggtggggtagggtgttttttaattatagattatattaaaaaataataaataaatgaaaagtgtgtttttttaggtagtggtttttaattaggggttgttttggtttttaagatatattggtaatgtttaaagatattgtgatttatatatttgggggtggaggaaggaagaaggggtgtatttaggggttatttaaagggtggtggttagggatattgttaaataatttttaatgtataaggtagtttttattatggggtgatttagtttttgaggttaatagtgttaaggttgggggattgtagaaaaaggattagtgtttaaatttaagatatgtatttttatatgtgtgtatttttttattagtataaagagggttaaaatttttttttgttgtttgttttttaaaaggagttgttttagtgtattttgggagttttttgatatttttgtttgtttttggaagttattgattgtggatgaggttttattgggtgtaggtaagtattttatgttttgtttttgagtttttgtaatgtagttttttgttttttattgtaggtagtttaagtggagtttaatgtagaattttaaagtgaaggttggaattgtttgagtgggtttgttagaaatgttatttttatttaaaagggtggttagttttgtaattattttattggagtttttatgatttgttatttttttaaagttataaatatttgtatagtagatgatgagtataagtgatatggggatgttttattgatttgataataatgatgtttgtttaaaaataggttttgtaagtggagtatttggagggtttgtatgttagggaggtatggttttatttatatttggtgtgatgtggtttttttttggatatatattgttttttaatagtggtatgagttagtttgttttgtgtttgggatttataaaaagtgtattaatatttttttaaatatatttttgtttatgtgtttaatttagtaaagattgattaaattt

SEQ ID NO: 2894 - DNA, 2481 bp, Artificial Sequence
  chemically treated genomic DNA (Homo sapiens)
tattttgattatgttttgtttttagtagagataatagttttagagaggttaggatttttatttaaggttatatagtttaaagtatagaattgggttttgaattttaaaagttagattaaagagtttattttgtagttattttgttgtgtgtagttgagaattttgtgggggttagttgtgtttgagaaagtatgtgaggaaattgaagtttttttaaaattgtgggggtggttttattgtttttgtttttattgtttttgagttagttgtaaagaaaggaatttttttgtagagtattgttttgaaggaaaatttatttggggaaaaaaaaaataattgtttttgttgggagtaatttttaaatgggagtttatgtgtgggttttttgtttgttgttttaagtaaattagttatttttattgtagaatggttgtaaaggaaatggagaaaaggtagagtgtagttttgggagttgttttttagtttgggggttgggtagggggaaataggtgttatttgggtttagatggggtgatgtttgggaggagaggttggaggaattgggtttttttattatggggttttgtttgtggttattgttgtttatagaggttttataggtgtatgtagtgtttttttttgtttttttggttgttgttttttgtgggatagttgtaggttggtttttgttggaggggtttttttgaattttgtttattttgggtttggttttttttaatatggtagttggggaggtagaggaggtggtgtgtttattttgttattgttggggtttgatttattaataggtttggatagtgttttttttttttttatgtttttattgttaattgtttgtttgtagagtggttagttttgttttagtagtgtggtgagttgtagttttgttgttgatggtgtgtttgtgatgtgttgtggggttttgttgtggtggttgtggatgggttgaggtttttttttggatgtttttagagtggtagggagtagtttgggtattttttatgtttggtataatttgtttgggttggtagttagagaagttaggtagagaagtgtggttagagaggttgtttaatttaatttttttgggttgggttatttgaaagtttaaaattttttaatattaagagatgggtggtatttaaatttaagtttggtttttaaatgaaatttttttgtttaattgtttaattttatttggaaatatgaaatggtaatttgattatatgttaaggtagttttggttgggggattagagttgaaatttttgtttttttgagtttattttttagtgaatggaatttatttaaattaggaattagttttgttattgtgggtgagttgtaggtttggtggtttggagggtggggtattttgaggttgtgggattttagttattttgtatggttaggataagggggtgtttagagttttgtgttttttaagggaggttggaaggaaatgtttaattgtgtgttttttagagttttagtaaattatttgatgtttataaattgttagtgaaagttatttgtaagaaaagttttatttttagtggttttgtagtttagaaaatttaaaattgaaaaatatatgttatttaggaaggataggagaaatgagaataggttttattgttgtagagtgtgaggttggtttttgttgtgtttgtttttaggaggtggtgttgagatggtggaggtaatggaagtagaaatgagtgaaatttttttgttgtgtttagtaagtattttttgttaaggaagttgttaaatttataaatgtttttgttaagagagaggtgtttgttttttatatgagtttgttgttggtaaggaggtatgatagaaaatgtgttaagttgggatttggagtaggtggtggaaatagtagtttgtaggatgttggttttgtttgtatggtggtttgagagttgtttgaattgttgtgttgaggatggggttggagatttgtttttaggtgaggggttggtttttgtaggttttgttttgtttttgaggtattattagatgggtgttattagttatatggtgtaggtgaggagatagaggattgaggtgggtagaagtgataggagaggtaaagagttgttttttgtatagttattgtttatgttgtttgattatttttttttgttgtttagtttttgtatttggttttggttttatttattgttggttattagttatttggaggttagttatatttggggggtagttttgttgtttggatttttgagttatattgaaagtatttagttttttttttttttgaagtttttaggttttgttttttttttattatatgggtttttttttgagtattttttttgttttttttgtggatttgtttagtttttgtttggtgggtgtgttaggtttttgttgttttagtgtggggattttttaggggagggagtggttgtagttttagaagtgt

SEQ ID NO: 2895 - DNA, 2481 bp, Artificial Sequence
  chemically treated genomic DNA (Homo sapiens)
gtatttttgaggttatggttatttttttttttggaggatttttatattgaggtagtagaaatttgatatatttattaggtgagagttgggtaggtttatagaggagataggagggatgtttagaggggaatttatatggtaaggagagggtaggatttggaggttttaggaggaagggggattgagtgtttttggtgtggtttagaggtttagatagtagagttgttttttgggtgtggttgatttttaggtgattggtggttagtagtgggtgaggttgaggttagatgtagaggttggatggtggagaggggtggttagatagtatggatagtggttgtgtaggggatagttttttgttttttttgttatttttatttgttttggttttttgtttttttatttgtattatgtggttggtgatatttgtttggtgatgttttagagataaaatagaatttgtagaggttagttttttatttgagggtgaatttttagttttgtttttagtatagtagtttgggtggtttttaggttgttatgtaggtaggattgatattttgtaaattgttgtttttattatttgttttgggttttagtttgatatgttttttgttgtgtttttttattaataataagtttgtgtggagagtaggtgttttttttttggtaagaatatttgtgagtttggtaatttttttgataagagatatttgttaaatataataaaaaagttttatttgtttttgtttttattatttttgttgttttggtattgttttttggaagtagatgtagtgggggttggttttatgttttgtagtgatggagtttgtttttgttttttttgttttttttgggtggtgtgtgttttttagttttgagttttttaagttgtagagttattggaaatggagttttttttataaatgatttttattgatagtttataaatattgagtgatttgttagggttttgggaagtatatagttgaatgtttttttttaattttttttggggaatgtagagttttgggtgtttttttattttggttatgtagagtaattggaattttgtagttttaagatgttttattttttaggttattaggtttgtggtttgtttgtggtagtagaattgatttttaatttggatggattttatttgttggaggatgaatttagaggggtagagattttggttttaattttttgattaaagttattttaatatgtaattaagttattattttatatttttaaataaagttgaatagttgaatgaaaagattttatttgggagttagatttaaatttaaatattgtttgttttttggtattagggagttttagatttttaaataatttagtttggggaaattgggttggatagtttttttggttgtatttttttgtttggtttttttaattgttagtttgggtggattgtgttgagtgtggagagtatttaggttgttttttgttattttgagagtatttagaggaagattttagtttgtttatagttgttatgatgggattttatagtatattgtggatatattgttaatgatggagttgtgatttgttgtgttgttgagatagggttggttgttttataggtaggtaattagtagtgggggtgtgggaaggaggggagtgttgtttagatttgttggtaaattaggttttggtagtgataaggtagatatgttgttttttttgtttttttagttgttatgttggagagagttagatttaggataaatagaatttggagaagtttttttagtgagagttagtttgtgattattttgtaaaaggtagtagttaggaggatggggaggaatgttgtatgtatttgtgaagtttttgtggatggtggtggttatagatagggttttgtggtgggaaggtttggtttttttagtttttttttttaggtattgttttgtttaggtttaggtggtatttgtttttttttgtttggtttttaggttgggaggtagtttttagggttgtgttttgttttttttttattttttttgtagttattttgtagtgaaaatggttgatttgtttgaagtagtaagtgaaaaatttatgtgtggatttttgtttggaaattgtttttaatggagatagttgttttttttttttttaagtaagtttttttttaaagtgatgttttgtagagaaatttttttttttataattaatttagagatagtgaaaatagggatgatggggttatttttatgattttgggggagttttagtttttttatatatttttttaggtataattgatttttatgaggtttttggttatatatagtagggtggttgtagggtgggttttttagtttgatttttggggtttaaagtttagttttgtattttgagttgtgtgattttgagtgagaattttgatttttttgagattgttgtttttgttgggaatagagtatgattagggtg

SEQ ID NO: 2896 - DNA, 2425 bp, Artificial Sequence
  chemically treated genomic DNA (Homo sapiens)
gttattaagaagaagaagaggggtttagaggtatgtagaatttagttgaaaaagaataatttatttatgtttgaagttttaaattagttttaattatttttgttaagagttgaggaagggatttaggagaaaggggattaaatttattttttttttttttatgaattttagtataatttgttttaagttaatttttattgaatgttgtgggttgattgttattttaagttatttgttttttttaaatattttaagaagtgttttgatttattttatagatgaagaaattgagatttaaagaggttaagtaattttttaagtggtgaatataggtggtagagaagattgaagatttaaattttggttgttagtttttaaaatttgaatttattattgatttttatggtattggtttggattagattatttttaatattttttttaattttgagattttaggattttttgatgttaggatattataaatttattataatttttttaaatttgttaaattaattttagatttttatgattatagatatgatatttttagaattaatatttaaattaaggtaggattattatatagaaaatataattgagtagaatttatttttgttatgttgttttttttagaattgattttaaaatatagtgttatgtttgttagagttagttatttgtaatgtgttagaattttgattttaggtaagtgttaggagttaaaatgtaggtttttttaaatttttaagtagttgtggtgttaagttgattttgatgagttgagtttttattgagtagtttaaatgattagattgtaattaggggttttatttttttatttatgaagtattagggtagttaaggggaaagattgatgtagaaggaatgaggtttttatgggttgggtttaaaagatttagagtgagtgtttagttgaaatatttgttaaaattttaaggaatatttatataaaaataagaagttgtttggtatagaagttagggtaggggatgttttttgaaggttatattttatggtaggtatatagtagtatgtttaaatatggtttttgttaaggttagagaggtattatttatatagaagaagttattattgtgattttatttattttgtgtttttattgtgtaattgaatgttgagtgtggatggtattttttttagtatttggttgtgttattgtgtttagttggtaagttttgggggagaagagaggtttagaaggaagattatttgagtttattagaataatgtgtgtttttaataaggtaggggtgtttaaatttagtaggtttaatagattaagttatgttatgaaggttttgtggattatttatttttgttaattagttattatttaaaagatgagaaaatgttagtttataggttaaatgggaggtatttagaagagatattaatgaagagatgtttggttttgtattaattattgtaggtaaattaatattaaatgttaggaagtaaagtagaggtatttttttattataaatttttgggataagtttagagattattagtagtttagggtttgtgtatgttgagaattgaggggataatagaattgtgtaatattttggtgttttattgtttttgttattaaattttatagtttatagtattgttttggtatattgggtttgtgtaatatttatggatttgatttggaattataaagtggatttagtttttgttatatttatttattttagtgattttgggtatatattgtgtttttgaaggaggtatagtggttataaatggaaatagtatttgtttgtttttggggattttggttatagatttttgaggtttttttgggagttagtttaagataatgggtaagagtatggattttgaaggtagagttttttgtttggaattttagttttgttattttttaattgtgtggttttaataagttatttagtttgtttgtgatttaggttttttatttataaaatgggtataatagtttttattttatagggttgttatggtgatttgtgggttaatattaaaggagattttttaattttagtattattgatatttggggttggataattttttgttttgggggttgttttgagtattatgggatgtttagtaatttttttattttttatgaattgttgtgataattaaaattgtttttagatattgttatatgttttaaatattttttaggggggtaaaattgtttttagttgagaattattgtattagattatgttgtagatataaatagttaaatattagtaattttatgtggtttaatttaataattataaagtatttaatagttaaaattttttgaattttgtagatatatttatgtgttttatttgggataaatgaatttaatgtttttattagatgttta

SEQ ID NO: 2897 - DNA, 2425 bp, Artificial Sequence
  chemically treated genomic DNA (Homo sapiens)
tgagtgtttggtgaaagtattgggtttgtttattttagatgaagtatataaatgtatttataaagtttaaagagttttaattgttaaatattttataattgttagattgaattatgtgaaattgttgatatttggttatttgtatttatgatataatttaatatagtggtttttaattggaggtaattttgtttttttaggaaatatttgggatatgtggtaatgtttggagataattttggttgttataatagtttgtagagggtagggaggttgttaaatattttataatatttaggatagtttttagaataaagaattatttggttttaaatgttaatggtattgaggttgagaaattttttttaatattagtttatgaattattatgataattttatgaggtaggaattattatgtttattttatagatgaggagtttgagttataggtaggttaagtagtttgttaaggttatatagttgggaaatggtagggttaggattttaagtagaggattttgtttttagagtttatatttttatttattattttagattggtttttaggaaagttttagaagtttatgattaaggtttttagaagtaggtaaatgttatttttatttatggttattgtgttttttttagaggtatagtgtgtgtttagagttattggggtgaatgaatgtaatagaagttgagtttgttttgtgattttaggttaagtttatgagtattatataagtttagtgtgttaaggtgatattgtgaattgtgagatttggtaatgggggtggtggggtattaaggtgttgtataattttgttatttttttagtttttagtgtatataagttttggattgttggtggtttttgggtttgttttaagggtttataataggaaaatgtttttattttattttttggtatttggtattaatttatttatagtaattaatataaagttagatatttttttattggtgttttttttaaatgttttttatttggtttgtgagttggtgtttttttattttttaagtggtgattggttggtgggggtaggtggtttataagatttttatagtataatttggtttgttggatttattgagtttgggtgtttttgttttgttaaaagtatatattgttttgatggatttagatggttttttttttgaatttttttttttttttaaggtttgttaattgagtatggtaatgtagttaagtgttggaagaagtgttgtttatatttagtatttaattatgtggtgggggtgtggggtgggtagagttatgatgatgattttttttatgtgaatggtgtttttttagttttaataggaattatgtttaagtgtgttgttgtatgtttgttatggagtgtggtttttgaagaatattttttattttgatttttgtgttgagtaattttttatttttgtgtgggtgttttttgaggttttggtaaatgttttaattaagtatttgttttaggttttttggatttagtttatgggaattttattttttttgtgttagtttttttttttgattgttttagtgttttgtgggtgagagaatgaagtttttggttatagtttggttatttgaattgtttagtaagaatttaatttattgaaattagtttggtattgtagttatttggaagtttgaaggaatttgtattttagtttttagtatttgtttagagttgaaattttgatatattataaatgattggttttgataaatatagtgttgtgttttagggttaattttgaaaagaataatatggtaaaggtagattttatttagttgtgttttttgtgtaataattttattttgatttaaatattgattttaaaagtattatgtttgtaattatagagatttagaattggtttgataaatttaggagagttataataggtttataatgttttgatattagagaattttagaattttagagttggaaaagatgttaaaggtaatttaatttaaattaatgttatggagattagtggtaaatttaggttttggaggttgatagttagagtttgaatttttaattttttttgttatttgtgtttgttatttggaaagttatttaatttttttgggttttagtttttttatttgtaaaatgggttaaagtattttttagggtgtttgagagaagtaaatgatttagaatagtagttagtttataatatttaataaaagttagtttagaataagttatattgaaatttgtaaggagaggaggaatgagtttggtttttttttttttaagttttttttttagtttttaataagagtagttaaagttggtttagaattttagatataagtgggttgtttttttttagttgggttttgtatgtttttgggtttttttttttttttttggtagt

SEQ ID NO: 2898 - DNA, 2492 bp, Artificial Sequence
  chemically treated genomic DNA (Homo sapiens)
aattaatttttaagtgtatttttaaatgtatttttttagttgttaggtagatgagtattttttttttgtgaatttatttttaattttttttttttagttatttattgtatggtattattaatattttttagtatttttgttttggagtttaaagtgatatagttggtaagaagttgtgtaggggttggagtttatatttgttgggtattagagtttttgttttgagttatttgtttgtgttgggattggtaggttatttttatagtagattatttttatttatttttagtgttttagtatgtagttttttgggaatttagattatgatattttttttgggaagtggtatggagaattttggttaggtgttttaagttaagtttatgttaatgatattagggtatagagaagttttttgtggtttatggggaggtgggaatatttgtaatatggtttttttaattttattttgttaggattggagagtatgaaggagtttgtttttttgtaaaaatgggtagttagagggttttgggggttaaatggatatttttttgtttgtagttttttgtagtttttttatgtagataggtatggttaagttttgtggagttgataggtgtattttgattttagagtattgtgtgggtttttaggggttgtaggttattgttgtttttttttttttttttattataaaaggtaggttttttgagaagtattgggtgtatgtttttgagtgaggggttttggtttatagggtagtggttggggtagagttgttggattggtgagtttattgggagtttttagttttgggttaggtttatatagagtttggggtgggggttaatgttattgttgaatgtgtttttttttagtgatttttaaagggagatgaaagttaaaaataattttggtgggggaaatagttggtggatagtgggttagtgatgggggtgggtaggaggatgtggtattgttggggggaggaagtagattaaatgtttttttttttttaagttgtaagggatggatagtattatttgtggtttttgtggttggtattttttttgtagtgtttttttgttaggagtttttttagataataagttgtagaagagagtaggagatggagtaggtattgtgtgtattggattgaaatttttaagtgttttttgtatttgttttagtgttagttatagtttaggtttttaatgttttttggttttttatgttggaagtttttttagtagatggttttatggttagagttggttttttgtgagttttgttgttgttttaattgtagtgtttattatttgagtttttttttgtgagttatttttatttgttaaagtgaatttaggttgattttgtttttgttgtgtttggtttgttatttattttttgttatgagtgattttaaatatgttttatgattgaagagttttgagtagagagaatttagtagttttttaggagttatatttgtttttattttaattatttttttgtgatattgtgggtttgttttttatttgttatttttgatttaggttttaagatatatgtgatttattttattttagtttgataattagagataatttggtgtaattatatgttttttgatagtaattggggtatgagagtataggtggttagggagtgtgggtggtgttaggtttttatagggtatatattgtggtttatgttggttttttttttagatgatatgttatttttattgttttgtgatatttggaaatagtattataagatagtttttttaaggttttaaagtttttttttgttaaggatggtgattagtttattttagttttttgagaataaagtaaaaggaaatgattattattaaaatagaatataagaatgatgtaaaaaaaaaagggttttttgtagtaaaattataaaagggttgtaaagttttagaattttttttattgatgttttgtaaaatataggtattgggtttatgttttttagtgaggggttttggtttatagggtagtggttttttaggtggagtgtttataggtggtttagatgttttattggttttgtttttttttagtttgtgttttggatagattgggtagtgtgtgggaattattttgtgttttattgttttttgtttatattgtttttgtatttatttgaattgttttagattattttggttggttgttttttttagggtttttgtgaatattttttttttaggaaattaagttagaagatgtttttttttttttggaattttttttgtatttgatttgtatattttttaggttttggttgttgtttttgttggatggattgtagttttttagggaaggtttttattttagttttttttgtgttaattgagtatttgttatatttaagtattgggtttggtattggggattttttgagtgaaataaaggttttttgtttttatagagtttatgttttttattagaaag

SEQ ID NO: 2899 - DNA, 2492 bp, Artificial Sequence
  chemically treated genomic DNA (Homo sapiens)
ttttttagtagagaatgtaagttttgtgagggtaaggaatttttgttttatttaaggaatttttagtattgagtttggtgtttgaatgtagtaggtgtttaattaatatagggaggattggaatgaaaattttttttgaggggttgtagtttatttaataaggatagtggttagggtttaagaagtgtatgggttaagtgtagagggagttttaaggagaaggagatattttttagtttggttttttaaaggaggaatatttgtagggattttgaagaaggtagttggttaagatgatttggggtagtttaggtggatgtaggagtagtgtgaataagaggtagtaaaatgtagggtggtttttgtatattgtttagtttgtttggagtgtaggttgaggaagggtagggttaatgagatatttgggttatttgtgaatattttgtttggggagttattgttttgtgagttaaggttttttgttgggaggtatgagtttagtgtttgtgttttgtagagtattaataaaagaaattttagaattttgtagtttttttataattttgttgtaagaagtttttttttttttatattatttttatattttattttaatagtagttatttttttttgttttgtttttagaggattaagataagttaattattatttttggtaaaaggagattttgaagttttaaaaaggttgttttgtgatattatttttaagtattataagatagtaaaagtggtatattatttgggagaggggttgatgtggattatagtgtgtgttttgtgaaagtttggtattatttatattttttgattatttgtgtttttatgttttagttgttgttaggaagtatgtgattatattgaattatttttagttgttaggttgggataaaatagattatatatattttaggatttaggttagggatggtaagtgaaaagtaggtttatagtgttatagaggggtaattaaagtaaggatagatgtggtttttgaagggttgttgaattttttttgtttagaattttttgattatagggtatatttgagattatttataataaagaatagatagtaagttagatatagtaaaaataaagttggtttaaatttattttagtgagtgaaggtggtttgtgagagggggtttagatgataggtattgtagttagggtagtaatagagtttataggaggttagttttggttatgaggttatttgttaaggagatttttagtataagaggttggagggtgttgaaggtttgggttgtggttggtattggggtaggtgtaagagatatttaggagttttaatttgatgtatatagtgtttgttttattttttgtttttttttgtagtttattatttgagagaatttttaataggaagatattgtaggggaaatgttaattataaaggttatagatagtgttgtttgttttttgtggtttgagggaaaaggagtatttggtttgttttttttttttgatagtgttatatttttttgtttatttttattattggtttgttatttattagttattttttttattaaaattatttttaatttttatttttttttgaaggttattaggagaaagtatatttaatagtggtattaatttttattttaagttttgtatgggtttgatttaaggttgggggtttttaatggatttattaatttagtagttttgttttagttgttgttttgtgagttaaggttttttatttggaggtatgtgtttagtgttttttgggaaatttgttttttgtgatgggaggggaggaggaggtagtagtgatttgtagtttttgggagtttatatagtgttttgaggttagaatatatttattaattttatagagtttggttatgtttgtttatatggggagattgtagaaggttgtaggtagaagggtgtttatttggtttttagaattttttaattgtttatttttgtagggagatgggtttttttgtgttttttagttttaatggaatggagttaaagaagttgtgttgtagatgtttttatttttttataaattatagaaaatttttttgtgttttggtattattggtatgggtttggtttagggtatttggttaggattttttatattattttttaaaaaaggtgttatagtttgagtttttagagagttgtgtgttagaatattgggaatggatgggaatggtttgttgtgggagtagtttgttggttttagtatgggtaggtggtttaggatagaggttttggtgtttagtagatgtaaattttagtttttatgtagttttttattagttgtgttattttaggttttaggatagaaatgttaaagggtattggtggtattgtgtagtgggtagttggggagaaggggttgggggtaagtttatagaggaaaaatgtttatttgtttagtagttagagaaatgtatttaaaaatatatttaaggattagtt

SEQ ID NO: 2900 - DNA, 2489 bp, Artificial Sequence
  chemically treated genomic DNA (Homo sapiens)
tttatggttagggatagtgatattagtgtgtttattaagtatttgatttatttgtttaggtaaaattttagaagagatattgggatttgtgtggagagtttttttattgtagttattttgttaagtttattgtaaagtgatgaattttgtggatatttatagagaaaaaatagttttaaatgttatagattaatgttgtatgttgtagagatatagtttttgggttttgtgagttgtatttgggtattatgtagagtttagttgttatttgtttttttgaaggttagttaagaagttggttttagtttgggtatggtattattgttttatattttagttatttgggatattttgggtttaagtatttttttttattgttggattaagtattttttattttttgttttgggaaattagattttagtaggttattaattattttagaaagtttagtagagttggttttggtttgggggtgttttttgagttgggtggaagaagagattttatataattttttaattttttttttaaggttgaattttttataagtaaaattttaaaattttttttaaagaagaaaaatatttagataatttttaaaatttttttttagttttaagattgtgtaattttgtgatattagtattgaaagtttttgtatttttttaattatatatttttttatgttagggaaaggtgtatgtaagtgagagaataaaaaattttataattgtggggatttttttttttggttttggagtttttttttttttgtttttgtatggggtagttttttttttttgttttttttttttttttttgtttattaaattttttgtgttttagaattaaaaataaaaaataaaaatttaaaattatgattttaggggtgaaagaatattgagaaattatagaaagtaaaaatgaaaagttaatatagaaaaagtttgatttgaattagaagtagtatttaaaattataggtttagaaaaagtttgaatagaatttagggttgaggttagttttgagtttgtaggttttgtttttttataaaggtgagtagatgggtttggagagggttgtttatgttatggaagggtttttatgttattgaggttaaaattaaagtaggagtaaattagttttgttagtgtgtatagttggtattaaagaggtaataatggtagagaatattttttgaaagatatatatgaaattagtaatggtgatggtttttggaagaattaggttagaagtagatttaatttgtattgtgtatattttttggtattttttttaattgaatgtatgtgaatgtattatttatttaaaaataaatgtgtaaaaatatgtgttatgataaagtaaaatgaggagatagtataaaaaagataaggataattttaaattttttttaataaaatgttgtttaaaaatttaagaggaaaaaagggtaggttttagttagtggagagaataattgaaaaataagagttatgtgtttttatggttttggttaattttattttttttttatttttatttgtttatatttgttttggagtatttatagtaagtttggttttatgtttagaatattgtttggttttttttttttttttttgtttatatttttttagttatttgttgtttttttttttgttttttttttagtttttagtttgtttattaaattttaggtggtattttttattttttgttatgagggagtttatttgtttatgtaatttttttattggagataaaatgtattttttaaagttggtttgtaatgatattttttatgtttgttttgtttatttatgattttgatattttttttattgagagggtagaatttgtgttttttttttttgaatttaggtgggttatagttttggtagaagtgatattttgtgattttaaggttaggttataaaaagggaatgtagtttttgttagtaattttgggatatatatttggagtttgagttgttgtgtaagttatttgtttgttttgagtttattatattataaggaagtttaagttagtttataggagagatgaggtgaagagaatgagatgttagtttttattgttttagttttttagtgttttagttttagttattatttgattgtaattttatgaaagattgagttagaattatgagtttagttttttttgatgttgatatatagattttatgaaagagaataaattaatttttgttttaagttattatgatttgggatgatttgttatgtagtattggataattgtaatatttgtttttaaatagtagaattttaaatgtttaggttttatttttaatttattttatgtttttgtttttattgattttttgttattgagtttgattaagtttttgagttattaattttagatatttgtttaaataaatttattgtgattgtttatattatttatttttttaaaataatttttgttatagttggttttt

SEQ ID NO: 2901 - DNA, 2489 bp, Artificial Sequence
  chemically treated genomic DNA (Homo sapiens)
gaaggttaattataatagggattgttttggaggaatggatagtgtagatagttatagtgaatttgtttaaataaatatttggaattggtgatttaagggtttggttaagtttagtggtaaaaaattagtgagaataggaatatgaagtaagttagagatggggtttagatgtttgggattttattgtttagaagtaggtgttgtagttatttagtgttgtataataaattattttaaattatagtggtttaaagtaaaaattagtttatttttttttatgaagtttgtatgttaatattaggaagggttgggtttgtggttttggtttagttttttatggggttgtagttagatagtggttggggttgggatattagagagttggagtagtggagattggtattttattttttttattttgttttttttgtgggttagtttgggtttttttatagtgtggtgggtttagagtaggtagatggtttatatagtagtttgggttttaagtgtgtgttttaggattgttggtagaagttgtattttttttttgtgatttagttttaaggttatagagtgttatttttattagagttgtagtttatttagatttagagagaggaaatataggttttgtttttttgatggaaggagtgttaaagttatgggtaagtagagtaggtatgggagatgttattgtaagttaattttgggaaatatattttgtttttggtggggaaattgtatgaataaatgaatttttttatagtagagaatggagagtattatttgagatttgatgggtaaattgagaattgggagagaagtaagagaggaggtagtgagtgattgaggagatgtgggtagggagagaggaggaaagttaggtgatgttttgggtatgaagttaggtttgttgtgggtgttttaaggtagatgtgaatgagtgaggatgggaaagaagtggggttggttaggattatgggaatatgtggtttttgttttttagttgttttttttattagttggagtttatttttttttttttttagatttttaaatagtgttttattaggagaaatttaaaattatttttgttttttttatattgtttttttattttgttttgttgtggtatgtgtttttatatatttatttttgaataggtaatgtatttatatgtgtttaattaaaaaggatattaaagaatgtatatagtgtaaattaagtttgtttttgatttaatttttttagagattattgttgttattggttttatgtgtgttttttagaaaatattttttattgttgttgtttttttgatgttgattgtatatattagtagggttgatttgtttttgttttggttttagttttgatggtatagaggtttttttatagtatgaatagttttttttagatttatttatttatttttgtgagagggtagagtttgtagatttagggttgattttagttttggattttgtttaagttttttttgaatttgtaattttaagtgttgtttttaatttaagttagattttttttatgttggttttttatttttgttttttatggttttttagtgtttttttatttttaagattatgattttgaatttttattttttatttttggttttaaggtgtagagagtttagtagataagaaggaagggagaagatagaaggaaaaagttgttttgtatagagatagagggaagggggttttaaagttgaaagaagaggtttttatgattgtgaaattttttgtttttttatttatatgtatttttttttggtataggggaatatatagttagggaaatgtaggggtttttaatattggtattatagaattatatagttttggagttgaaaggggattttaaggattgtttgggtgttttttttttttaaaaaaaattttaaaattttgtttatagggaatttagttttagagaaaaagttaaaagattatataaggtttttttttttatttaatttaaaaaatatttttaaattaaaattaattttgttggattttttgggatggttgatgatttattgagatttgattttttagagtaggaggtgggaagtgtttgatttagtaatgggagggaatgtttgaatttaggatattttaaatggttggaatgtaggatagtggtattatgtttaggttgggattaattttttagttggtttttaaagggatagatggtagttgaattttgtgtaatgtttaaatatagtttatagaatttaaagattgtgtttttgtagtgtgtagtattggtttatagtatttgaagttattttttttttgtaagtgtttataaaatttgttattttataatgagtttggtaggatagttgtagtgaagaaattttttatataggttttagtgttttttttggaattttgtttgagtaagtaaattaaatatttggtaaatatattgatgttattgtttttagttatggg

SEQ ID NO: 2902 - DNA, 2417 bp, Artificial Sequence
  chemically treated genomic DNA (Homo sapiens)
gttgtttaggttggagtgtaatggtatgattttggtttattgtaatttttgtttgtattgaggtttaagtgatttttttgttttagtttttttagtagttgggattatagttatttgttattatgtttagttaatttttttgtgtatttttagtagagagggggttttattatgttggttaggttggttttaaatttttgattttaggtgatttatttgttttagttttttaaaatgttgggattataggtgtgagttattgtggttaattaggaatgaatatttttaaggtttttgatatatattgttaaatattttttaagattgtgttggtttattttttttttttagaattttgggtgtgggagtttagaggttgttggtttgtttttagtaggtaaagatgttatttattttttaggaaggaagtgtagtagtttttgagtgttataggttttgtttttgtgggtgttggagtgtgtttggtgttgtttttttttaggtttagatattatttgttggtggtggatgtttgtaattattgtggttattagttggttttagggagatgatgtagttgtgtgtttttattttattaaagtggaatgtatttttaaggttttggaagtgatagagtgtgtaattttttttggttatttatttgtttttttttaggggaattttgtttgagttagtaggagtaaattggattgggtgggtgtgttggggtgaagggttaggattgtatgataggtgggtggttagaaaagttgggggtgagggtattatggagaatttaagttgggttagtaggttttttgtgtaagtgttttgttttgtataatatgatagttgttttagtagttgttagtattgtgtttgggtttttttttttgtagtttttatggtgttataggttgaaaagaagagatgagagtagtgtggtttttagtatttttagaagttttgtggtggaggtaggtattggtggtttataattagtgtagagaggttattgttgtttttaaaatttatgtgtattggagtattttgtttttgtgtgttagtattttatttattttttttttagttatttttatttttattattaattttggtaattttgttttgtaattaaaatagtttttagtatatggtataattggagagtttttgatatttttttttggagatttatgtttgtgttttgggggtatttggtattagtgatgggtagttttgtttgttgattttttggttgtttttaattggatttgagtattttaagagaaattgtaaaatgttttaagatagaaaggttttatgaggttttatttttagagttaaggttgtagtattttttattaagtagatttttaattggtgtataggaaggagttgagaagagtgagtatatataggtttgaagttttttgttttttgaagtagatgtgatattttaattttattgaagtagttttatttgtaagtattttgattaggtaagtatttagtttggtatagtattttatttgtatgtgtgttttttttagttgatgtgtttgaggatattgagatttagtaggtaagttgtttaaagttattttgttttagagtagtagagtttttatggatagttaagatatttttgtaggtattgttgtttgttggatttatttatttttgggtttttttgttttttagggattaggatgttatgagaatttttttttatttttagtttttttttttatttttagttttttttatagaaagaagttaattaagtatttttagagagtttaatattatatttttgggggggtggttttttaaagaatgggtataatattttattgtggttattttataggtaaggaaattgaggtatatgttggaatgattattttgggtggttttttagtagtagatgtgatggtgaagtttgtgtttttgatttttagtattgaatgaaggtgttaaagggtggggtgttaattttagtttagggttggtattttagatttggagttggtggtatggtgttatagtggtagtattggagttaatagatgtatatgttatattagtgtggggtgtggtagttattggtttgggtttttttgtttgttatgtaggtgatatatagtgatttgttttttgattttttgttattgttgtaggagttttttggtgaaggttattttttatgtttgtagagttatgtatgttttattttttgggaaagtagatgggtagtagagttttttttgttattgtgagagggttagtggttatttatggagtagttttaatgttagtggggttatttttgattttgtttttaattatgtgagtgggagttgagttggtttttgggggaggtgttttgtattggtttatgagaatatttttat

SEQ ID NO: 2903 - DNA, 2417 bp, Artificial Sequence
  chemically treated genomic DNA (Homo sapiens)
gtgggagtgtttttgtaaattagtgtagagtattttttttaggggttaatttagtttttatttatgtggttgagggtagggttagaggtggttttattgatgttgaggttgttttataggtggttattggtttttttgtaatggtagaaggaattttgttgtttatttgtttttttagggagtgaggtatgtatggttttgtaggtatggaagatggtttttattagggggtttttgtagtagtgatagggagttgagaggtaggttattatgtgttatttgtgtgataggtagaggggtttaagttagtgattgttatgttttatattgatatgatatgtgtatttgttgattttaatgttgttattatggtattatgttattagttttagatttgaaatgttagttttgagttagggttagtgttttattttttagtatttttatttaatgttggaagttagagatataggttttattattatgtttgttgttaagaagttatttaagatagttattttaatgtgtgttttagtttttttatttataaagtggttataataaggtgttgtatttgttttttaagggattatttttttagagatgtggtattaaattttttggagatatttagttagtttttttttgtagaggagattgggagtggaaggggaggttagggatgggggagggtttttatagtattttagtttttgaaaagtagagggatttaggggtaagtgaatttagtaggtagtagtgtttgtaggggtgttttggttgtttatggaagttttgttgttttggagtgaggtgattttggataatttatttgttgagttttagtgtttttaggtatattgattgggggagatatatatataggtggaatgttatattgggttgggtgtttatttagttagagtgtttataaatggggttattttaatgaaattagggtgttatatttattttagggaataaaggattttaagtttgtgtatatttattttttttagtttttttttgtgtgttggttaagggtttgtttgataggaaatgttatagttttggttttaaggataggattttgtggggtttttttgttttggagtattttatagttttttttagaatatttagatttaattagaaatagttggggagttagtaggtagggttgtttattattagtgttgaatgtttttaagatgtagatatgaatttttaaagaggaatgttaaaagttttttggttatgttatgtgttaaaggttattttagttataggataaagttgttagggttgatggtgggggtggaggtggttggaaggaaagtggataaaatgttagtatataggggtaagatgttttagtgtatatgagttttgggggtaatagtggtttttttgtattgattgtgaattattagtgtttgtttttattataaagtttttgaagatgttgggggttatattgtttttgttttttttttttagtttgtggtgttatgaaggttgtagggaggaggatttggatatagtgttgatagttgttgggataattgttgtgttgtgtagagtaggatatttgtatagaggatttgttggtttaatttgagttttttatggtgtttttatttttgatttttttagttgtttatttgttatgtagttttgattttttattttaatatgtttatttagtttagtttgtttttgttaatttaaataagatttttttggagagaagtaagtgagtggttaaggagggttatgtattttgttatttttagggttttggggatgtgttttattttggtaaaatgagagtgtatagttgtattgtttttttggagttagttgatggttatagtgattgtagatgtttattattgatagatgatgtttggatttagaggagaatagtattaaatgtattttagtatttatagaaatgagatttgtggtgtttagaggttgttatattttttttttaggagatgggtaatatttttgtttgttgggaatgggttagtagtttttgggtttttatatttaggattttgggggaggggaatagattagtataattttggaaagtgtttggtaatatatattaagagttttaaaaatgtttatttttggttggttgtggtggtttatgtttgtaattttagtattttgggaggttgaggtaggtggattatttgaggttaggagtttgagattagtttggttaatatggtgaaattttttttttattaaaaatatataaaaaaattagttgggtatggtggtgggtgattgtaattttagttattagggaggttgaggtaagagaattgtttgaattttggtgtgggtggaggttgtagtgagttgagattgtgttattgtattttagtttgggtaat
